(19) United States
(12) Patent Application Publication
(10) Pub. No.: US 2017/0202938 A1
(43) Pub. Date: Jul. 20, 2017

(54) Cancer Vaccines

(71) Applicant: Pfizer Inc., New York, NY (US)

(72) Inventors: Joseph John Binder, San Diego, CA (US); Paul Jason Cockle, Encinitas, CA (US); Derek John Falconer, San Diego, CA (US); Siradanahalli Guru, San Diego, CA (US); Karin Ute Jooss, San Diego, CA (US); Marianne Marcela Andrea Martinic, La Jolla, CA (US); Kenneth Nelson Wills, Carlsbad, CA (US); Helen Kim Cho, San Diego, CA (US)

(21) Appl. No.: 15/407,890

(22) Filed: Jan. 17, 2017

Related U.S. Application Data
(60) Provisional application No. 62/419,190, filed on Nov. 8, 2016.
(60) Provisional application No. 62/280,636, filed on Jan. 19, 2016.

(51) Int. Cl. A61K 39/00

(52) U.S. Cl. CPC A61K 39/0011; A61K 2039/70; A61K 2039/585; A61K 2039/57; A61K 2039/575; A61K 2039/53

(57) ABSTRACT

The present disclosure provides (i) isolated immunogenic TAA polypeptides (i.e., an immunogenic MUC1 polypeptides, an immunogenic MSLN polypeptides, and an immunogenic TERT polypeptides), (ii) isolated nucleic acid molecules encoding one or more immunogenic TAA polypeptides, (iii) compositions comprising an immunogenic TAA polypeptide or an isolated nucleic acid molecule encoding an immunogenic TAA polypeptide, and (iv) methods relating to uses of the polypeptides, nucleic acid molecules, and compositions.

### REFERENCE TO RELATED APPLICATIONS

[0001] This application claims priority to U.S. Provisional Application No. 62/280,636 filed Jan. 19, 2016 and U.S. Provisional Application No. 62/419,190 filed Nov. 8, 2016. The entire content of each of the foregoing applications is incorporated herein by reference.

### REFERENCE TO SEQUENCE LISTING

[0002] This application is being filed along with a sequence listing in electronic format. The sequence listing is provided as a file in .txt format entitled “PC71855A_SeqList_ST25.txt”, created on Nov. 8, 2016, and having a size of 751 KB. The sequence listing contained in the .txt file is part of the specification and is herein incorporated by reference in its entity.

### FIELD OF THE INVENTION

[0003] The present invention relates generally to immunotherapy and specifically to vaccines and methods for treating or preventing neoplastic disorders.

### BACKGROUND OF THE INVENTION

[0004] Cancers are a leading cause of mortality worldwide. They may occur in a variety of organs, such as pancreas, ovaries, breasts, lung, colon, and rectum. Pancreatic cancers are the fourth most common cause of cancer deaths in the United States. Pancreatic cancers may occur in the exocrine or endocrine component of the pancreas. Exocrine cancers include (1) pancreatic adenocarcinoma, which is by far the most common type, (2) acinar cell carcinoma, which represents 5% of exocrine pancreatic cancers, (3) cystadenocarcinomas, which account for 1% of pancreatic cancers, and (4) other rare forms of cancers, such as pancreatoblastoma, adenosquamous carcinomas, signet ring cell carcinomas, hepatoid carcinomas, colloid carcinomas, undifferentiated carcinomas, and undifferentiated carcinomas with osteoclast-like giant cells.

[0005] Ovarian cancer accounts for about 3% of cancers among women, but it causes more deaths than any other cancer of the female reproductive system. Ovarian cancers include (1) epithelial cancers, such as epithelial ovarian carcinomas, (2) germ cell cancers, such as immature teratomas, and (3) stromal cancers, such as granulosa cell tumors.

[0006] Breast cancer is the second most common cancer among American women and the second leading cause of cancer death in women. Breast cancers can be classified based on the hormone receptors and HER2/neu status, such as (1) hormone receptor-positive cancers (where the cancer cells contain either estrogen receptors or progesterone receptors), (2) hormone receptor-negative cancers (where the cancer cells don't have either estrogen or progesterone receptors), (3) HER2/neu positive (wherein cancers that have excessive HER2/neu protein or extra copies of the HER2/neu gene), (4) HER2/neu negative cancers (where the cancers don't have excess HER2/neu), (5) triple-negative cancers (wherein the breast cancer cells have neither estrogen receptors, nor progesterone receptors, nor excessive HER2), and (6) triple-positive cancers (where the cancers are estrogen receptor-positive, progesterone receptor-positive, and have too much HER2).

[0007] Lung cancer accounts for more than a quarter of all cancer deaths and is by far the leading cause of cancer death among both men and women. The most common type of lung cancers is non-small cell lung cancers (NSCLC), which account for about 85% to 90% of lung cancers. NSCLC may be further classified into several subtypes, such as squamous cell (epidermoid) carcinoma, adenocarcinoma, large cell (undifferentiated) carcinoma, adenosquamous carcinoma, and sarcomatoid carcinoma. The second common type of lung cancer is small cell lung cancer (SCLC), which accounts for about 10% to 15% of all lung cancers.

[0008] Colorectal cancer (CRC) is the second leading cause of cancer-related deaths in the United States when both men and women are combined. Adenocarcinoma is the most common type of CRC, which accounts for more than 95% of colorectal cancers. Other less common types of CRC include Carcinoid tumors, gastrointestinal stromal tumors (GISTs), lymphomas, and sarcomas.

[0009] Gastric cancer is the third most common cause of cancer-related death in the world. It remains difficult to cure, primarily because most patients present with advanced disease. In the United States, gastric cancer is currently the 15^{th} most common cancer. About 90-95% of gastric cancers are adenocarcinomas; other less common types include lymphoma (4%), GISTs, and carcinoid tumors (3%).

[0010] Traditional regimens of cancer management have been successful in the management of a selective group of circulating and solid cancers. However, many types of cancers are resistant to traditional approaches. In recent years, immunotherapy for cancers has been explored, particularly cancer vaccines and antibody therapies. One approach of cancer immunotherapy involves the administering an immunogen to generate an active systemic immune response towards a tumor-associated antigen (TAA) on the target cancer cell. While a large number of tumor-associated antigens have been identified and many of these antigens have been explored as viral-, bacterial-, protein-, peptide-, or DNA-based vaccines for the treatment or prevention of cancers, most clinical trials so far have failed to produce a therapeutic product. Therefore, there exists a need for immunogens that may be used in the treatment or prevention of cancers.

[0011] The present disclosure relates to immunogens derived from the tumor-associated antigens MUC1, mesothelin, and TERT, nucleic acid molecules encoding the immunogens, and compositions comprising such immunogens or nucleic acids.

[0012] The human mucin 1 (MUC1; also known as episialin, PEM, H23Ag, EMA, CA15-3, and MCA) is a polymorphic transmembrane glycoprotein expressed on the apical surfaces of simple and glandular epithelia. The MUC1 gene encodes a single polypeptide chain precursor that includes a signal peptide sequence. Immediately after translation the signal peptide sequence is removed and the remaining portion of the MUC1 precursor is further cleaved into two peptide fragments: the longer N-terminal subunit (MUC1-N or MUC1a) and the shorter C-terminal subunit (MUC1-C or MUC16). The mature MUC1 comprises a MUC1-N and a MUC1-C associated through stable hydrogen bonds. MUC1-N, which is an extracellular domain, contains 25 to 125 variable number tandem repeats (VNTR) of 20 amino acid residues. MUC1-C contains a short extracellular region (approximately 53 amino acids), a transmembrane domain (approximately 28 amino acid), and a cytoplasmic tail (approximately 72 amino acids). The cytoplasmic tail of MUC1 (MUC1-CT) contains highly conserved serine and tyrosine residues that are phosphorylated by growth factor receptors and intracellular kinases. Human MUC1 exists in multiple isoforms resulting from different types of MUC1 RNA alternative splicing. The amino acid sequence of full length human MUC1 isoform 1 protein precursor (isoform 1, Uniprot P15941-1) is provided in SEQ ID NO: 1 (“MUC1 Isoform 1 Reference Polypeptide”). At least 16 other isoforms of human MUC-1 have been reported so far (Uniprot P15941-2 through P15941-17), which include various insertions, deletions, or substitutions as compared to the sequence of isoform 1. These isoforms are known as isoform 2, 3, 4, 5, 6, Y, 8, 9, F, Y-LSP, S2, M6, ZD, T10, E2, and J13 (Uniprot P15941-2 through P15941-17, respectively). The full length human MUC1 isoform 1 precursor protein consists of 1255 amino acids, which includes a signal peptide sequence at amino acids 1-23. The MUC1-N and MUC1-C domains of the mature MUC1 protein consist of amino acids 24-1097 and 1098-1255, respectively.

[0013] Mesothelin (also known as MSLN) is a membrane-bound glycoprotein present on the surface of cells lining the pleura, peritoneum and pericardium, and is overexpressed in several human tumors, including mesothelioma, ovarian, and pancreatic adenocarcinoma. The Mesothelin gene encodes a 71-kilodalton (kDa) precursor protein that is processed to a 40-kDa Mesothelin protein and a secreted megakaryocyte potentiating factor (MPF) protein (Chang, et al, Proc Natl Acad Sci USA (1996) 93:136-40). Alternative splicing of MSLN gene results in at least four mesothelin isoforms. The amino acid sequences of isoform 1 (Uniprot Q13421-1), isoform 2 (Uniprot Q13421-3), isoform 3 (Uniprot Q13421-2), and isoform 4 (Uniprot Q13421-4) are available at Uniprot (www.uniprot.org). The amino acid sequence of full length human MSLN isoform 2 precursor protein (Uniprot identifier Q13421-3), which consists of 622 amino acids, is provided in SEQ ID NO:2 (“Mesothelin Precursor Isoform 2 Reference Polypeptide”). The cytoplasmic portion of MSLN comprises amino acid residues 37 to 597 of SEQ ID NO:2 Isoform 2 is the major form of MSLN. Isoform 1, which consists of 630 amino acids, differs from isoform 2 by having an insertion of 8 amino acids (PQAPRRPL) at position 409 of the isoform 2 sequence. Isoform 3 has an alternative C terminus (at positions 593-622 of isoform 2) while isoform 4 has a deletion of amino acid 44, as compared with isoform 2. Isoform 2 is initially translated as a 622-amino acid precursor, which comprises a signal peptide sequence (amino acids 1-36) at the N-terminus and a GPI-anchor sequence at the C-terminus. The signal peptide sequence and the GPI-anchor sequence may be cleaved off in the mature mesothelin.

[0014] Telomerase reverse transcriptase (or TERT) is the catalytic component of the telomerase, which is a ribonucleoprotein polymerase responsible for maintaining telomere ends by addition of the telomere repeat TTAGGG. In addition to TERT, telomerase also includes an RNA component which serves as a template for the telomere repeat. Human TERT gene encodes an 1132 amino acid protein. Several isoforms of human TERT exist, which result from alternative splicing. The amino acid sequences of isoform 1, isoform 2, isoform 3, and isoform 4 are available at Uniprot (<www.uniprot.orq>, Uniprot identifiers O14746-1, O14746-2, O14746-3, and O14746-4, respectively). The amino acid sequence of human full length TERT isoform 1 protein (isoform 1, Genbank AAD30037, Uniprot O14746-1) is also provided herein in SEQ ID NO:3 (“TERT Isoform 1 Reference Polypeptide”). As compared with TERT isoform 1 (O14746-1), isoform 2 (O14746-2) has replacement of amino acids 764-807 (STLTDLQPYM . . . LNEASSGLFD→LRPVPGDPAG . . . AGRAAPAFGG) and deletion of C-terminal amino acids 808-1132), isoform 3 (O14746-3) has deletion of amino acids 885-947, and isoform 4 (O14746-4) has deletions of amino acids 711-722 and 808-1132, and replacement of amino acids 764-807 (STLTDLQPYM . . . LNEASSGLFD→LRPVPGDPAG . . . AGRAAPAFGG).

### SUMMARY OF THE INVENTION

[0015] In some aspects, the present disclosure provides isolated immunogenic polypeptides which comprise amino acid sequences of one or more human TAA selected from MUC1, MSLN, and TERT. The immunogenic polypeptides are useful, for example, in eliciting an immune response in vivo in a subject or for use as a component in vaccines for treating cancer.

[0016] In other aspects, the present disclosure provides nucleic acid molecules that encode an immunogenic polypeptide provided by the present disclosure. In some embodiments, the present disclosure provides multi-antigen nucleic acid constructs that each encode two, three, or more immunogenic polypeptides.

[0017] The disclosure also provides vectors containing one or more nucleic acid molecules of the invention. The vectors are useful for cloning or expressing the immunogenic TAA polypeptides encoded by the nucleic acid molecules, or for delivering the nucleic acid molecules in a composition, such as a vaccine, to a host cell or to a host animal or a human.

[0018] In some further aspects, the present disclosure provides compositions comprising one or more immunogenic TAA polypeptides, isolated nucleic acid molecules encoding immunogenic TAA polypeptides, or vectors or plasmids containing nucleic acid molecules encoding immunogenic TAA polypeptides. In some embodiments, the composition is an immunogenic composition useful for eliciting an immune response against a TAA in a subject, such as a mouse, dog, monkey, or human. In some embodiments, the composition is a vaccine composition useful for immunization of a mammal, such as a human, for inhibiting abnormal cell proliferation, for providing protection against the development of cancer (used as a prophylactic), or for treatment of disorders (used as a therapeutic) associated with TAA over-expression, such as cancer, particularly pancreatic, ovarian, and triple-negative breast cancer. In still other aspects, the present disclosure provides methods of using the immunogenic TAA polypeptides, isolated nucleic acid molecules, and compositions comprising an immunogenic TAA polypeptide or isolated nucleic acid molecules described herein above. In some embodiments, the present disclosure provides a method of eliciting an immune response against a TAA in a subject, particularly a human, comprising administering to the subject an effective amount of a polypeptide provided by the invention that is immunogenic against the target TAA, an effective amount of an isolated nucleic acid molecule encoding such an immunogenic polypeptide, or a composition comprising such an immunogenic TAA polypeptide or an isolated nucleic acid molecule encoding such an immunogenic TAA polypeptide. The polypeptides, nucleic acids, or compositions comprising the polypeptide or nucleic acid may be used together with one or more adjuvants or immune modulators.

### DETAILED DESCRIPTION OF THE INVENTION

### A. Definitions

[0019] The term “adjuvant” refers to a substance that is capable of enhancing, accelerating, or prolonging an immune response elicited by an immunogen.

[0020] The term “agonist” refers to a substance which promotes (induces, causes, enhances or increases) the activity of another molecule (such as a receptor). The term “agonist” encompasses substances which bind a receptor and substances which promote receptor function without binding thereto.

[0021] The term “antagonist” or “inhibitor” refers to a substance that partially or fully blocks, inhibits, or neutralizes a biological activity of another molecule or a receptor.

[0022] The term “co-administration” refers to administration of two or more agents to the same subject during a treatment period. The two or more agents may be encompassed in a single formulation and thus be administered simultaneously. Alternatively, the two or more agents may be in separate physical formulations and administered separately, either sequentially or simultaneously to the subject. The term “administered simultaneously” or “simultaneous administration” means that the administration of the first agent and that of a second agent overlap in time with each other, while the term “administered sequentially” or “sequential administration” means that the administration of the first agent and that of a second agent do not overlap in time with each other.

[0023] The term “cytosolic” or “cytoplasmic” means that after a nucleotide sequence encoding a particular polypeptide is expressed by a host cell, the expressed polypeptide is expected to be retained inside the host cell.

[0024] The term “degenerate variant” refers to a polynucleotide that differs in the nucleotide sequence from the reference polynucleotide but encodes the same polypeptidesequence as encoded by the reference polynucleotide. Most of the 20 natural amino acids that are components of proteins or peptides are specified by more than one codon. For instance, the codons CGU, CGC, CGA, CGG, AGA, and AGG all encode the amino acid arginine. Thus, at every position where an arginine is specified within a protein-encoding sequence, the codon can be altered to any of the corresponding codons described without altering the amino acid sequence of the encoded protein. Because of the degeneracy of the genetic code, a large number of functionally identical nucleic acids encode any given polypeptide.

[0025] The term “effective amount” refers to an amount administered to a subject that is sufficient to cause a desired effect in the subject.

[0026] The term “fragment” of a given polypeptide refers to a polypeptide that is shorter than the given polypeptide and shares 100% identity with the sequence of the given polypeptide.

[0027] The term “functional variant” of an immunogenic TAA polypeptide refers to a polypeptide that comprises from 90% to 110% of the number of amino acids of the reference immunogenic TAA polypeptide, has lower than 100% but higher than 95% identity to the amino acid sequence of the reference TAA polypeptide, and possess the same or similar immunogenic properties of the reference immunogenic TAA polypeptide.

[0028] The term “identical” refers to two or more nucleic acids, or two or more polypeptides, that share the exact same sequence of nucleotides or amino acids, respectively. The term “percent identity” describes the level of similarity between two or more nucleic acids or polypeptides. When two sequences are aligned by bioinformatics software, “percent identity” is calculated by multiplying the number of exact nucleotide/amino acid matches between the sequences by 100, and dividing by the length of the aligned region, including gaps. For example, two 100-amino acid long polypeptides that exhibit 10 mismatches when aligned would be 90% identical.

[0029] The term “immune-effector-cell enhancer” or “IEC enhancer” refers to a substance capable of increasing or enhancing the number, quality, and/or function of one or more types of immune effector cells of a subject. Examples of immune effector cells include cytolytic CD8 T cells, CD4 T cells, NK cells, and B cells.

[0030] The term “immune modulator” refers to a substance capable of altering (e.g., inhibiting, decreasing, increasing, enhancing or stimulating) the working or function of any component of the innate, humoral, or cellular immune system of a subject. Thus, the term “immune modulator” encompasses the “immune-effector-cell enhancer” as defined herein and the “immune-suppressive-cell inhibitor” as defined herein, as well as substance that affects any other components of the immune system of a subject.

[0031] The term “immune response” refers to any detectable response to a particular substance (such as an antigen or immunogen) by the immune system of a host vertebrate animal, including, but not limited to, innate immune responses (e.g., activation of Toll-like receptor signaling cascade), cell-mediated immune responses (e.g., responses mediated by T cells, such as antigen-specific T cells, and non-specific cells of the immune system), and humoral immune responses (e.g., responses mediated by B cells, such as generation and secretion of antibodies into the plasma, lymph, and/or tissue fluids). Examples of immune responses include an alteration (e.g., increase) in Toll-like receptor activation, lymphokine (e.g., cytokine (e.g., Th1, Th2 or Th17 type cytokines) or chemokine) expression or secretion, macrophage activation, dendritic cell activation, T cell (e.g., CD4+ or CD8+ T cell) activation, NK cell activation, B cell activation (e.g., antibody generation and/or secretion), binding of an immunogen (e.g., antigen, immunogenic polypeptide) to an MHC molecule, induction of a cytotoxic T lymphocyte (“CTL”) response, induction of a B cell response (e.g., antibody production), and expansion (e.g., growth of a population of cells) of cells of the immune system (e.g., T cells and B cells), and increased processing and presentation of antigen by antigen presenting cells. The term “immune response” also encompasses any detectable response to a particular substance (such as an antigen or immunogen) by one or more components of the immune system of a vertebrate animal in vitro.

[0032] The term “immunogen” refers to a substance that is immunogenic.

[0033] The term “immunogenic” refers to the ability of a substance upon administration to a subject (such as a human) to cause, elicit, stimulate, or induce an immune response, or to improve, enhance, increase or prolong a pre-existing immune response, against a particular antigen in the subject, whether alone or when linked to a carrier, in the presence or absence of an adjuvant.

[0034] The term “immunogenic composition” refers to a composition that is immunogenic.

[0035] The term “immunogenic MUC1 polypeptide” refers to a polypeptide that is immunogenic against a human native MUC1 protein or against cells expressing the human native MUC1 protein. The polypeptide may have the same amino acid sequence as that of a human native MUC1 protein or display one or more mutations as compared to the amino acid sequence of a human native MUC1 protein.

[0036] The term “immunogenic MSLN polypeptide” refers to a polypeptide that is immunogenic against a human native MSLN protein or against cells expressing human native MSLN protein. The polypeptide may have the same amino acid sequence as that of a human native MSLN protein or displays one or more mutations as compared to the amino acid sequence of a human native MSLN protein.

[0037] The term “immunogenic TERT polypeptide” refers to a polypeptide that is immunogenic against a human native TERT protein or against cells expressing a human native TERT protein. The polypeptide may have the same amino acid sequence as that of a human native TERT protein or displays one or more mutations as compared to the amino acid sequence of a human native TERT protein.

[0038] The term “immunogenic TAA polypeptide” refers to an “immunogenic MSLN polypeptide,” an “immunogenic MUC1 polypeptide, or an “immunogenic TERT polypeptide,” each as defined herein above.

[0039] The term “immunogenic MUC1 nucleic acid molecule” refers to a nucleic acid molecule that encodes an “immunogenic MUC1 polypeptide” as defined herein.

[0040] The term “immunogenic MSLN nucleic acid molecule” refers to a nucleic acid molecule that encodes an “immunogenic MSLN polypeptide” as defined herein.

[0041] The term “immunogenic TERT nucleic acid molecule” refers to a nucleic acid molecule that encodes an “immunogenic TERT polypeptide” as defined herein.

[0042] The term “immunogenic TAA nucleic acid molecule” refers to a nucleic acid molecule that encodes an “immunogenic MUC1 polypeptide,” an “immunogenic MSLN polypeptide, or an “immunogenic TERT polypeptide” as defined herein above.

[0043] The term “immune-suppressive-cell inhibitor” or “ISC inhibitor” refers to a substance capable of reducing and/or suppressing the number and/or function of immune suppressive cells of a subject. Examples of immune suppressive cells include regulatory T cells (“Tregs”), myeloid-derived suppressor cells, and tumor-associated macrophages.

[0044] The term “subject” refers to either a human or a non-human mammal. The term “mammal” refers to any animal species of the Mammalia class. Examples of mammals include: humans; non-human primates such as monkeys; laboratory animals such as rats, mice, guinea pigs; domestic animals such as cats, dogs, rabbits, cattle, sheep, goats, horses, and pigs; and captive wild animals such as lions, tigers, elephants, and the like.

[0045] The term “membrane-bound” means that after a nucleotide sequence encoding a particular polypeptide is expressed by a host cell, the expressed polypeptide is bound to, attached to, or otherwise associated with, the membrane of the cell.

[0046] The term “neoplastic disorder” refers to a condition in which cells proliferate at an abnormally high and uncontrolled rate, the rate exceeding and uncoordinated with that of the surrounding normal tissues. It usually results in a solid lesion or lump known as “tumor.” This term encompasses benign and malignant neoplastic disorders. The term “malignant neoplastic disorder”, which is used interchangeably with the term “cancer” in the present disclosure, refers to a neoplastic disorder characterized by the ability of the tumor cells to spread to other locations in the body (known as “metastasis”). The term “benign neoplastic disorder” refers to a neoplastic disorder in which the tumor cells lack the ability to metastasize.

[0047] The term “mutation” refers to deletion, addition, or substitution of amino acid residues in the amino acid sequence of a protein or polypeptide as compared to the amino acid sequence of a reference protein or polypeptide.

[0048] The term “operably linked” refers to a juxtaposition wherein the components described are in a relationship permitting them to function in their intended manner. A control sequence “operably linked” to a transgene is ligated in such a way that expression of the transgene is achieved under conditions compatible with the control sequences.

[0049] The term “pharmaceutically composition” refers to a solid or liquid composition suitable for administration to a subject (e.g. a human patient) for eliciting a desired physiological, pharmacological, or therapeutic effect. In addition to containing one or more active ingredients, a pharmaceutical composition may contain one or more pharmaceutically acceptable excipients.

[0050] The term “pharmaceutically acceptable excipient” refers to a substance in an immunogenic, pharmaceutical, or vaccine composition, other than the active ingredients (e.g., the antigen, antigen-coding nucleic acid, immune modulator, or adjuvant) that is compatible with the active ingredients and does not cause significant untoward effect in subjects to whom it is administered.

[0051] The terms “peptide,” “polypeptide,” and “protein” are used interchangeably herein, and refer to a polymeric form of amino acids of any length, which can include coded and non-coded amino acids, chemically, or biochemically modified or derivatized amino acids, and polypeptides having modified polypeptide backbones.

[0052] The term “preventing” or “prevent” refers to (a) keeping a disorder from occurring or (b) delaying the onset of a disorder or onset of symptoms of a disorder.

[0053] The term “secreted” in the context of a polypeptide means that after a nucleotide sequence encoding the polypeptide is expressed by a host cell, the expressed polypeptide is secreted outside of the host cell.

[0054] The term “suboptimal dose” when used to describe the amount of an immune modulator, such as a protein kinase inhibitor, refers to a dose of the immune modulator that is below the minimum amount required to produce the desired therapeutic effect for the disease being treated when the immune modulator is administered alone to a patient. The term “treating,” “treatment,” or “treat” refers to abrogating a disorder, reducing the severity of a disorder, or reducing the severity or occurrence frequency of a symptom of a disorder.

[0055] The term “tumor-associated antigen” or “TAA” refers to an antigen which is specifically expressed by tumor cells or expressed at a higher frequency or density by tumor cells than by non-tumor cells of the same tissue type. Tumor-associated antigens may be antigens not normally expressed by the host; they may be mutated, truncated, misfolded, or otherwise abnormal manifestations of molecules normally expressed by the host; they may be identical to molecules normally expressed but expressed at abnormally high levels; or they may be expressed in a context or milieu that is abnormal. Tumor-associated antigens may be, for example, proteins or protein fragments, complex carbohydrates, gangliosides, haptens, nucleic acids, or any combination of these or other biological molecules.

[0056] The term “vaccine” refers to an immunogenic composition for administration to a mammal (such as a human) for eliciting a protective immune response against a particular antigen or antigens. The primary active ingredient of a vaccine is the immunogen(s).

[0057] The term “vector” refers to a nucleic acid molecule, or a modified microorganism, that is capable of transporting or transferring a foreign nucleic acid molecule into a host cell. The foreign nucleic acid molecule is referred to as “insert” or “transgene.” A vector generally consists of an insert and a larger sequence that serves as the backbone of the vector. Based on the structure or origin of vectors, major types of vectors include plasmid vectors, cosmid vectors, phage vectors (such as lambda phage), viral vectors (such as adenovirus vectors), artificial chromosomes, and bacterial vectors.

### B. Immunogenic Tumor-Associated-Antigen (TAA) Polypeptides

[0058] In some aspects, the present disclosure provides isolated immunogenic MUC1 polypeptides, TERT polypeptides, and MSLN polypeptides, which are useful, for example, for eliciting an immune response in a subject against MUC1, TERT, and MSLN, respectively, or for use as a component in vaccines for treating cancer, such as pancreatic, ovarian, and breast cancer, particularly triple-negative breast cancer.

[0059] These immunogenic TAA polypeptides can be prepared by methods known in the art in light of the present disclosure. The capability of the polypeptides to elicit an immune response can be measured in in vitro assays or in vivo assays. In vitro assays for determining the capability of a polypeptide or DNA construct to elicit immune responses are known in the art. One example of such in vitro assays is to measure the capability of the polypeptide or nucleic acid expressing a polypeptide to stimulate T cell response as described in U.S. Pat. No. 7,387,882, the disclosure of which is incorporated in this application. The assay method comprises the steps of: (1) contacting antigen presenting cells in culture with an antigen thereby the antigen can be taken up and processed by the antigen presenting cells, producing one or more processed antigens; (2) contacting the antigen presenting cells with T cells under conditions sufficient for the T cells to respond to one or more of the processed antigens; (3) determining whether the T cells respond to one or more of the processed antigens. The T cells used may be CD8⁺ T cells or CD4⁺ T cells. T cell response may be determined by measuring the release of one of more of cytokines, such as interferon-gamma and interleukin-2, and lysis of the antigen presenting cells (tumor cells). B cell response may be determined by measuring the production of antibodies.

[0060] B-1. Immunogenic MUC1 Polypeptides

[0061] In one aspect, the present disclosure provides isolated immunogenic MUC1 polypeptides derived from a human native MUC1, wherein the MUC1 polypeptides display one or more introduced mutations relative to the human native MUC1 protein. Examples of mutations include deletion of some, but not all, of the tandem repeats of 20 amino acids in the VNTR region of the MUC1 protein, deletion of the signal peptide sequence in whole or in part, and deletion of amino acids of non-consensus amino acid sequences found in the MUC1 isoforms. Thus, in some embodiments, the immunogenic MUC1 polypeptides provided by the present disclosure comprise (1) the amino acid sequence of 3 to 30 tandem repeats of 20 amino acids of a human MUC1 protein and (2) the amino acid sequences of the human MUC1 protein that flank the VNTR region. In some particular embodiments, the immunogenic MUC1 polypeptides comprise (1) the amino acid sequence of 5 to 25 tandem repeats of the human MUC1 and (2) the amino acid sequences of the human MUC1 protein that flank the VNTR region. In some further embodiments, the immunogenic MUC1 polypeptides are in cytoplasmic form (or “cMUC1”). The term “cytoplasmic form” refers to an immunogenic MUC1 polypeptide that lacks in whole or in part the secretory sequence (amino acids 1-23; also known as “signal peptide sequence”) of the human native MUC1 protein. The deletion of amino acids of the secretory sequence is expected to prevent the polypeptide from entering the secretory pathway as it is expressed in the cells. In some other embodiments, the immunogenic MUC1 polypeptides comprise the amino acid sequence of a membrane-bond form of the MUC1.

[0062] The immunogenic MUC1 polypeptides provided by the present disclosure may be derived, constructed, or prepared from the amino acid sequence of any of the human MUC1 isoforms known in the art or discovered in the future, including, for example, Uniprot isoforms 1, 2, 3, 4, 5, 6, Y, 8, 9, F, Y-LSP, S2, M6, ZD, T10, E2, and J13 (Uniprot P15941-1 through P15941-17, respectively). In some embodiments, the immunogenic MUC1 polypeptides comprise an amino acid sequence that is part of human MUC1 isoform 1 wherein the amino acid sequence of the human MUC1 isoform 1 is set forth in SEQ ID NO:1. In a specific embodiment, the immunogenic MUC1 polypeptide comprises amino acids 24-225 and 1098-1255 of the amino acid sequence of SEQ ID NO:1. In another specific embodiment, the immunogenic MUC1 polypeptide comprises amino acids 22-225 and 946-1255 of the amino acid sequence of SEQ ID NO:1. In some other specific embodiments, the immunogenic MUC1 polypeptide comprises, or consists of, the amino acid sequence selected from the group consisting of:

[0063] (1) the amino acid sequence of SEQ ID NO:8 (Plasmid 1027 polypeptide);

[0064] (2) an amino acid sequence comprising amino acids 4-537 of SEQ ID NO:8;

[0065] (3) an amino acid sequence comprising amino acids 24-537 of SEQ ID NO:8;

[0066] (4) the amino acid sequence of SEQ ID NO:16 (Plasmid 1197 polypeptide);

[0067] (5) an amino acid sequence comprising amino acids 4-517 of SEQ ID NO:16; and

[0068] (6) an amino acid sequence comprising amino acids 4-517 of SEQ ID NO:16, wherein in SEQ ID NO:16 the amino acid at position 513 is T.

[0069] In some specific embodiments, the immunogenic MUC1 polypeptides comprise the amino acid sequence of SEQ ID NO:8 (Plasmid 1027 polypeptide) or SEQ ID NO:16 (Plasmid 1197 polypeptide).

[0070] B-2. Immunogenic MSLN Polypeptides

[0071] In one aspect, the present disclosure provides isolated immunogenic MSLN polypeptides derived from a human MSLN precursor by deletion of a portion or the entire signal peptide sequence of the MSLN precursor. Thus, the immunogenic MSLN polypeptides comprise the amino acid sequence of a native human MSLN precursor, wherein part or the entire signal peptide sequence of the MSLN precursor is absent. In some embodiments, part of, or the entire, GPI anchor sequence of the native human MSLN (i.e., amino acids 598-622 of SEQ ID NO:2) is also absent in the immunogenic MSLN polypeptide. As used herein, the term “human MSLN” encompasses any human MSLN isoform, such as isoform 1, 2, 3, or 4. In some particular embodiments, the human MSLN is human MSLN isoform 2.

[0072] In some particular embodiments, the isolated immunogenic MSLN polypeptide is selected from the group consisting of:

[0073] 1) a polypeptide comprising, or consisting of, amino acids 37-597 of the amino acid sequence of SEQ ID NO:2;

[0074] 2) a polypeptide comprising an amino acid sequence that is at least 90%, 95%, 98%, or 99% identical to the amino acid sequence consisting of amino acids 37-597 of the amino acid sequence of SEQ ID NO:2;

[0075] 3) a polypeptide comprising, or consisting of, the amino acid sequence of SEQ ID NO:6, or amino acids 4-564 of the amino acid sequence of SEQ ID NO:6; and

[0076] 4) a polypeptide comprising an amino acid sequence that has at least 93%-99%, 94%-98%, or 94%-97% identity to the amino acid sequence of SEQ ID NO:6 (“Plasmid 1103 Polypeptide”).

[0077] B-3. Immunogenic TERT Polypeptides

[0078] In another aspect, the present disclosure provides isolated immunogenic TERT polypeptides derived from a human TERT protein by deletion of up to 600 of the N-terminal amino acids of the TERT protein. Thus, in some embodiments, the immunogenic TERT polypeptides comprise the amino acid sequence of TERT isoform 1 set forth in SEQ ID NO:3, wherein up to about 600 amino acids from the N-terminus (amino terminus) of the amino acid sequence of TERT isoform 1 are absent. Any number of amino acids up to 600 from the N-terminus of the TERT isoform 1 may be absent in the immunogenic TERT polypeptide. For example, the N-terminal amino acids from position 1 through position 50, 100, 50, 200, 245, 300, 350, 400, 450, 500, 550, or 600 of the TERT isoform 1 of SEQ ID NO:3 may be absent from the immunogenic TERT polypeptide. Thus, an immunogenic TERT polypeptide provided by the present disclosure may comprise amino acids 51-1132, 101-1132, 151-1132, 201-1132, 251-1132, 301-1132, 351-1132, 401-1132, 451-1132, 501-1132, or 551-1132 of SEQ ID NO:3. The immunogenic TERT polypeptides may also be constructed from other TERT isoforms. Where the polypeptides are constructed from TERT isoforms with C-terminal truncations, however, it is preferred that fewer amino acids may be deleted from the N-terminus.

[0079] In some further embodiments, the immunogenic TERT polypeptide further comprises one or more amino acid mutations that inactivate the TERT catalytic domain. Examples of such amino acid mutations include substitution of aspartic acid with alanine at position 712 of SEQ ID NO:3 (D712A) and substitution of valine with isoleucine at position 713 of SEQ ID NO:3 (V713I). In some embodiments the immunogenic TERT polypeptide comprises both mutations D712A and V713I.

[0080] In some specific embodiments, the present disclosure provides an immunogenic TERT polypeptide selected from the group consisting of:

[0081] 1) a polypeptide comprising an amino acid sequence of SEQ ID NO:10 or amino acids 2-892 of SEQ ID NO:10 (“Plasmid 1112 Polypeptide”); or a functional variant of the polypeptide;

[0082] 2), a polypeptide comprising an amino acid sequence of SEQ ID NO:14 or amino acids 3-789 of SEQ ID NO:14 (“Plasmid 1326 Polypeptide”), or a functional variant of the polypeptide; and

[0083] 3) a polypeptide comprising an amino acid sequence of SEQ ID NO:12 or amino acids 4-591 of SEQ ID NO:12 (“Plasmid 1330 Polypeptide”), or a functional variant of the polypeptide.

### C. Nucleic Acid Molecules Encoding Immunogenic TAA Polypeptides

[0084] In some aspects, the present disclosure provides nucleic acid molecules that each encode one, two, three, or more separate immunogenic TAA polypeptides that are provided by the present disclosure. The nucleic acid molecules can be deoxyribonucleotides (DNA) or ribonucleotides (RNA). Thus, a nucleic acid molecule can comprise a nucleotide sequence disclosed herein wherein thymidine (T) can also be uracil (U), which reflects the differences between the chemical structures of DNA and RNA. The nucleic acid molecules can be modified forms, single or double stranded forms, or linear or circular forms. The nucleic acid molecules can be prepared using methods known in the art light of the present disclosure.

[0085] C-1. Single-Antigen Constructs

[0086] In one aspect, the present disclosure provides an isolated nucleic acid molecule, which comprises a nucleotide sequence encoding a single immunogenic MUC1 polypeptide, a single immunogenic MSLN polypeptide, or a single immunogenic TERT polypeptide provided by the present disclosure. A nucleic acid molecule that encodes only one immunogenic TAA polypeptide, such as an immunogenic MUC1 polypeptide, an immunogenic MSLN polypeptide, or an immunogenic TERT, is also referred to herein as “single-antigen construct.”

[0087] C-1a. MUC1 Single Antigen Constructs

[0088] In some embodiments, the present disclosure provides isolated nucleic acid molecules that encode an immunogenic MUC1 polypeptide provided in the present disclosure. The immunogenic MUC1 polypeptide encoded by a nucleic acid molecule may be in cytoplasmic form (or cMUC1) or “membrane-bound form (or mMUC1). The term “membrane-bound form” refers to an immunogenic MUC1 polypeptide that, after being expressed from the coding nucleic acid by a host cell, is bound to, attached to, or otherwise associated with, the membrane of the host cell.

[0089] In some specific embodiments, the isolated nucleic acid molecules provided by the present disclosure comprise a nucleotide sequence that encodes an immunogenic MUC1 polypeptide selected from the group consisting of:

[0090] (1) an immunogenic MUC1 polypeptide comprising the amino acid sequence of SEQ ID NO:8 (Plasmid 1027 polypeptide);

[0091] (2) an immunogenic MUC1 polypeptide comprising amino acids 4-537 of SEQ ID NO:8;

[0092] (3) an immunogenic MUC1 polypeptide comprising amino acids 24-537 of SEQ ID NO:8;

[0093] (4) an immunogenic MUC1 polypeptide comprising the amino acid sequence of SEQ ID NO:16 (Plasmid 1197 polypeptide);

[0094] (5) an immunogenic MUC1 polypeptide comprising amino acids 4-517 of SEQ ID NO:16;

[0095] (6) an immunogenic MUC1 polypeptide comprising amino acids 4-517 of SEQ ID NO:16, with the proviso that the amino acid at positon 513 is T; and

[0096] (7) an immunogenic MUC1 polypeptide comprising amino acids 24-225 and 946-1255 of SEQ ID NO:1.

[0097] In some other specific embodiments, the isolated nucleic acid molecules provided by the present disclosure comprise a nucleotide sequence, or a degenerate variant thereof, selected from the group consisting of:

[0098] (1) the nucleotide sequence of SEQ ID NO:7 (Plasmid 1027);

[0099] (2) a nucleotide sequence comprising nucleotides 10-1611 of SEQ ID NO:7;

[0100] (3) the nucleotide sequence of SEQ ID NO:15 (Plasmid 1197); and

[0101] (4) a nucleotide sequence comprising nucleotides 10-1551 of SEQ ID NO:15;

[0102] C-1 b. MSLN Single Antigen Constructs

[0103] In some embodiments, the present disclosure provides isolated nucleic acid molecules that encode an immunogenic MSLN polypeptide provided in the present disclosure.

[0104] In some particular embodiments, the isolated nucleic acid molecule encodes an immunogenic MSLN polypeptide selected from the group consisting of:

[0105] 1) an immunogenic MSLN polypeptide comprising, or consisting of, amino acids 37-597 of the amino acid sequence of SEQ ID NO:2;

[0106] 2) an immunogenic MSLN polypeptide comprising an amino acid sequence that is at least 90%, 95%, 98%, or 99% identical to the amino acid sequence consisting of amino acids 37-597 of the amino acid sequence of SEQ ID NO:2;

[0107] 3) an immunogenic MSLN polypeptide comprising, or consisting of, the amino acid sequence of SEQ ID NO:6; and

[0108] 4) an immunogenic MSLN polypeptide comprising an amino acid sequence that has at least 93%-99%, 94%-98%, or 94%-97% identity to the amino acid sequence of SEQ ID NO:6 (“Plasmid 1103 Polypeptide”).

[0109] In some other specific embodiments, the isolated nucleic acid molecules provided by the present disclosure comprise a nucleotide sequence, or a degenerate variant thereof, selected from the group consisting of:

[0110] (1) the nucleotide sequence of SEQ ID NO:5; and

[0111] (2) a nucleotide sequence comprising nucleotides 10-1692 of SEQ ID NO:5.

[0112] C-1c. TERT Single Antigen Constructs

[0113] In some other embodiments, the present disclosure provides isolated nucleic acid molecules that encode an immunogenic TERT polypeptide provided in the present disclosure.

[0114] An immunogenic TERT polypeptide encoded by a nucleic acid provided by the represent disclosure may contain a deletion of maximum of 600 amino acids from the N-terminus of the amino acid sequence of TERT isoform 1. Generally, an immunogenic TERT polypeptide may be expected to possess stronger immunogenicity if it has deletion of fewer amino acids from the N-terminus of the TERT protein. The number of N-terminal amino acids that can be deleted from the TERT protein may be determined based on how the nucleic acid molecule encoding the polypeptide is intended to be used or delivered. For example, where the nucleic acid molecule is to be delivered using a particular viral vector, the deletion may be determined based on the capacity of the vector used.

[0115] In some embodiments, the immunogenic TERT polypeptides encoded by the nucleic acid molecules comprise one or more amino acid mutations that inactivate the TERT catalytic domain. Examples of such amino acid mutations include substitution of aspartic acid with alanine at position 712 of SEQ ID NO:3 (D712A) and substitution of valine with isoleucine at position 713 of SEQ ID NO:3 (V713I). In some embodiments the immunogenic TERT polypeptide comprises both mutations D712A and V713I.

[0116] In some specific embodiments, the isolated nucleic acid molecules encode an immunogenic TERT polypeptide selected from the group consisting of:

[0117] (1) an immunogenic TERT polypeptide comprising an amino acid sequence of SEQ ID NO:10 or amino acids 2-892 of SEQ ID NO:10 (“Plasmid 1112 Polypeptide”), or a functional variant of the polypeptide;

[0118] (2), an immunogenic TERT polypeptide comprising an amino acid sequence of SEQ ID NO:14 or amino acids 3-789 of SEQ ID NO:14 (“Plasmid 1326 Polypeptide” or a functional variant of the polypeptide; and

[0119] (3) an immunogenic TERT polypeptide comprising an amino acid sequence of SEQ ID NO:12 or amino acids 4-591 of SEQ ID NO:12 (“Plasmid 1330 Polypeptide”), or a functional variant of the polypeptide.

[0120] In some particular embodiments, the isolated nucleic acid molecules comprise a nucleotide sequence, or a degenerate variant thereof, selected from the group consisting of:

[0121] (1) the nucleotide sequence of SEQ ID NO:9 (TERT240),

[0122] (2) a nucleotide sequence comprising nucleotides 4-2679 of SEQ ID NO:9;

[0123] (3) the nucleotide sequence of SEQ ID NO:11 (TERT541),

[0124] (4) a nucleotide sequence comprising nucleotides 10-1782 of SEQ ID NO:11;

[0125] (5) the nucleotide sequence of SEQ ID NO:13 (TERT342); and

[0126] (6) a nucleotide sequence comprising nucleotides 7-2373 of SEQ ID NO:13.

[0127] C-2. Multi-Antigen Constructs

[0128] In another aspect, the present disclosure provides nucleic acid molecules that each encode two, three, or more different immunogenic TAA polypeptides. A nucleic acid molecule that encodes more than one immunogenic TAA polypeptide is also referred to as “multi-antigen construct,” “multi-antigen vaccine,” “multi-antigen plasmid,” and the like, in the present disclosure. A nucleic acid molecule that encodes two different immunogenic TAA polypeptides is also referred to as a “dual-antigen construct,” “dual antigen vaccine,” or “dual antigen plasmid,” etc., in this disclosure. A nucleic acid molecule that encodes three different immunogenic TAA polypeptides is also referred to as a “triple-antigen construct,” “triple-antigen vaccine,” or “triple-antigen plasmid” in this disclosure.

[0129] Multi-antigen constructs provided by the present disclosure can be prepared using various techniques known in the art in light of the disclosure. For example, a multi-antigen construct can be constructed by incorporating multiple independent promoters into a single plasmid (Huang, Y., Z. Chen, et al. (2008). “Design, construction, and characterization of a dual-promoter multigenic DNA vaccine directed against an HIV-1 subtype C/B′ recombinant.” J Acquir Immune Defic Syndr 47(4): 403-411; Xu, K., Z. Y. Ling, et al. (2011). “Broad humoral and cellular immunity elicited by a bivalent DNA vaccine encoding HA and NP genes from an H5N1 virus.” Viral Immunol 24(1): 45-56). The plasmid can be engineered to carry multiple expression cassettes, each consisting of a) a eukaryotic promoter for initiating RNA polymerase dependent transcription, with or without an enhancer element, b) a gene encoding a target antigen, and c) a transcription terminator sequence. Upon delivery of the plasmid to the transfected cell nucleus, transcription will be initiated from each promoter, resulting in the production of separate mRNAs, each encoding one of the target antigens. The mRNAs will be independently translated, thereby producing the desired antigens.

[0130] Multi-antigen constructs provided by the present disclosure can also be constructed through the use of viral 2A peptides (Szymczak, A. L. and D. A. Vignali (2005). “Development of 2A peptide-based strategies in the design of multicistronic vectors.” Expert Opin Biol Ther 5(5): 627-638; de Felipe, P., G. A. Luke, et al. (2006). “E unum pluribus: multiple proteins from a self-processing polyprotein.” Trends Biotechnol 24(2): 68-75; Luke, G. A., P. de Felipe, et al. (2008). “Occurrence, function and evolutionary origins of ‘2A-like’ sequences in virus genomes.” J Gen Virol 89(Pt 4): 1036-1042; Ibrahimi, A., G. Vande Velde, et al. (2009). “Highly efficient multicistronic lentiviral vectors with peptide 2A sequences.” Hum Gene Ther 20(8): 845-860; Kim, J. H., S. R. Lee, et al. (2011). “High cleavage efficiency of a 2A peptide derived from porcine teschovirus-1 in human cell lines, zebrafish and mice.” PLoS One 6(4): e18556). These peptides, also called cleavage cassettes or CHYSELs (cis-acting hydrolase elements), are approximately 20 amino acids long with a highly conserved carboxy terminal D-V/I-EXNPGP motif (Table 19). These peptides are rare in nature, most commonly found in viruses such as Foot-and-mouth disease virus (FMDV), Equine rhinitis A virus (ERAV), Equine rhinitis B virus (ERBV), Encephalomyocarditis virus (EMCV), Porcine teschovirus (PTV), and Thosea asigna virus (TAV) (Luke, G. A., P. de Felipe, et al. (2008). “Occurrence, function and evolutionary origins of ‘2A-like’ sequences in virus genomes.” J Gen Virol 89(Pt 4): 1036-1042). With a 2A-based multi-antigen expression strategy, genes encoding multiple target antigens are linked together in a single open reading frame, separated by sequences encoding viral 2A peptides. The entire open reading frame can be cloned into a vector with a single promoter and terminator. Upon delivery of the constructs to a host cell, mRNA encoding the multiple antigens will be transcribed and translated as a single polyprotein. During translation of the 2A peptides, ribosomes skip the bond between the C-terminal glycine and proline. The ribosomal skipping acts like a cotranslational autocatalytic “cleavage” that releases the peptide sequences upstream of the 2A peptide from those downstream. The incorporation of a 2A peptide between two protein antigens may result in the addition of ˜20 amino acids onto the C-terminus of the upstream polypeptide and 1 amino acid (proline) to the N-terminus of downstream protein. In an adaptation of this methodology, protease cleavage sites can be incorporated at the N terminus of the 2A cassette such that ubiquitous proteases will cleave the cassette from the upstream protein (Fang, J., S. Yi, et al. (2007). “An antibody delivery system for regulated expression of therapeutic levels of monoclonal antibodies in vivo.” Mol Ther 15(6): 1153-1159).

[0131] Another strategy for constructing the multi-antigen constructs provided by the present disclosure involves the use of an internal ribosomal entry site, or IRES. Internal ribosomal entry sites are RNA elements found in the 5′ untranslated regions of certain RNA molecules (Bonnal, S., C. Boutonnet, et al. (2003). “IRESdb: the Internal Ribosome Entry Site database.” Nucleic Acids Res 31(1): 427-428). They attract eukaryotic ribosomes to the RNA to facilitate translation of downstream open reading frames. Unlike normal cellular 7-methylguanosine cap-dependent translation, IRES-mediated translation can initiate at AUG codons far within an RNA molecule. The highly efficient process can be exploited for use in multi-cistronic expression vectors (Bochkov, Y. A. and A. C. Palmenberg (2006). “Translational efficiency of EMCV IRES in bicistronic vectors is dependent upon IRES sequence and gene location.” Biotechniques 41(3): 283-284, 286, 288). Typically, two transgenes are inserted into a vector between a promoter and transcription terminator as two separate open reading frames separated by an IRES. Upon delivery of the constructs to a host cell, a single long transcript encoding both transgenes will be transcribed. The first open reading frame (ORF) will be translated in the traditional cap-dependent manner, terminating at a stop codon upstream of the IRES. The second ORF will be translated in a cap-independent manner using the IRES. In this way, two independent proteins can be produced from a single mRNA transcribed from a vector with a single expression cassette.

[0132] In some aspects, the present disclosure provides a dual-antigen construct comprising two coding nucleotide sequences, wherein each of the coding nucleotide sequences encodes an individual immunogenic TAA polypeptide. The structure of such a dual-antigen construct is shown in formula (I):

TAA1-SPACER1-TAA2 (I),

wherein in formula (I):

[0133] (i) TAA1 and TAA2 are nucleotide sequences each encoding an immunogenic TAA polypeptides selected from the group consisting of an immunogenic MUC1 polypeptide, an immunogenic MSLN polypeptide, and an immunogenic TERT polypeptide, wherein TAA1 and TAA 2 encode different immunogenic TAA polypeptides; and

[0134] (ii) SPACER1 is a spacer nucleotide sequence, or may be absent.

[0135] In some embodiments, the present disclosure provides a dual-antigen construct of formula (I), wherein in formula (I) TAA1 is a nucleotide sequence encoding an immunogenic MUC1 polypeptide, and TAA2 is a nucleotide sequence encoding an immunogenic MSLN polypeptide or immunogenic TERT polypeptide.

[0136] In some other embodiments, the present disclosure provides a dual-antigen construct of formula (I), wherein in formula (I) TAA1 is a nucleotide sequence encoding an immunogenic MSLN polypeptide, and TAA2 is a nucleotide sequence encoding an immunogenic MUC1 polypeptide or immunogenic TERT polypeptide.

[0137] In some further embodiments, the present disclosure provides a dual-antigen construct of formula (I), wherein in formula (I) TAA1 is a nucleotide sequence encoding an immunogenic TERT polypeptide, and TAA2 is a nucleotide sequence encoding an immunogenic MUC1 polypeptide or immunogenic MSLN polypeptide.

[0138] In some specific embodiments, the present disclosure provides a dual-antigen construct of a formula selected from a group consisting of:

(1) MUC1-2A-TERT (II)

(2) MUC1-2A-MSLN (III)

(3) MSLN-2A-TERT (IV)

(4) MSLN-2A-MUC1 (V)

(5) TERT-2A-MSLN (VI)

(6) TERT-2A-MUC1 (VII)

wherein in each of formulas (II)-(VII): (i) MUC1, MSLN, and TERT represent a nucleotide sequence encoding an immunogenic MUC1 polypeptide, an immunogenic MSLN polypeptide, and an immunogenic TERT polypeptide, respectively, and (ii) 2A is a nucleotide sequence encoding a 2A peptide.

[0139] In some other aspects, the present disclosure provides a triple-antigen construct comprising three coding nucleotide sequences wherein each of the coding nucleotide sequences expresses a different individual immunogenic TAA polypeptide. The structure of a triple-antigen construct is shown in formula (VIII):

TAA1-SPACER1-TAA2-S PACE R2-TAA3 (VIII)

wherein in formula (VIII):

[0140] (i) TAA1, TAA2, and TAA3 are each a nucleotide sequence encoding an immunogenic TAA polypeptide selected from the group consisting of an immunogenic MUC1 polypeptide, an immunogenic MSLN polypeptide, and an immunogenic TERT polypeptide, wherein TAA1, TAA2, and TAA3 encode different immunogenic TAA polypeptides; and

[0141] (ii) SPACER1 and SPACER2 are each a spacer nucleotide sequence, wherein (a) SPACER1 and SPACER2 may be the same or different and (b) either SPACER1 or SPACER2 or both SPACER1 and SPACER2 may be absent.

[0142] The term “spacer nucleotide sequence” as used in the present disclosure refers to a nucleotide sequence that is inserted between two coding sequences or transgenes in an open reading frame of a nucleic acid molecule and functions to allow co-expression or translation of two separate gene products from the nucleic acid molecule. Examples of spacer nucleotide sequences that may be used in the multi-antigen constructs provided by the present disclosure include eukaryotic promoters, nucleotide sequences encoding a 2A peptide, and internal ribosomal entry sites (IRES). Examples of 2A peptides include foot-and-mouth disease virus 2A peptide (FMD2A), equine rhinitis A virus 2A peptide (ERA2A), Equine rhinitis B virus 2A peptide (ERB2A), encephalomyocarditis virus 2A peptide (EMC2A), porcine teschovirus 2A peptide (PT2A), and Thosea asigna virus 2A peptide (T2A). The sequences of these 2A peptides are provided in Table 19.

[0143] In some embodiments, SPACER1 and SPACER2 are, independently, a nucleotide sequence encoding a 2A peptide, or a nucleotide sequence encoding GGSGG.

[0144] In some embodiments, the present disclosure provides a triple-antigen construct of formula (VIII), wherein in formula (VIII) (i) TAA1 is a nucleotide sequence encoding an immunogenic MUC1 polypeptide, (ii) TAA2 is a nucleotide sequence encoding an immunogenic MSLN polypeptide, and (iii) TAA3 is a nucleotide sequence encoding an immunogenic TERT polypeptide.

[0145] In some other embodiments, the present disclosure provides a triple-antigen construct of formula (VIII), wherein in formula (VIII) (i) TAA1 is a nucleotide sequence encoding an immunogenic MUC1 polypeptide, (ii) TAA2 is a nucleotide sequence encoding an immunogenic TERT polypeptide, and (iii) TAA3 is a nucleotide sequence encoding an immunogenic MSLN polypeptide.

[0146] In some other embodiments, the present disclosure provides a triple-antigen construct of formula (VIII), wherein in formula (VIII) (i) TAA1 is a nucleotide sequence encoding an immunogenic MSLN polypeptide, (ii) TAA2 is a nucleotide sequence encoding an immunogenic TERT polypeptide, and (iii) TAA3 is a nucleotide sequence encoding an immunogenic MUC1 polypeptide.

[0147] In some other embodiments, the present disclosure provides a triple-antigen construct of formula (VIII), wherein in formula (VIII) (i) TAA1 is a nucleotide sequence encoding an immunogenic MSLN polypeptide, (ii) TAA2 is a nucleotide sequence encoding an immunogenic MUC1 polypeptide, and (iii) TAA3 is a nucleotide sequence encoding an immunogenic TERT polypeptide.

[0148] In some specific embodiments, the present disclosure provides a triple-antigen construct of a formula selected from the group consisting of:

(1) MUC1-2A-MSLN-2A-TERT (IX)

(2) MUC1-2A-TERT-2A-MSLN (X)

(3) MSLN-2A-MUC1-2A-TERT (XI)

(4) MSLN-2A-TERT-2A-MUC1 (XII)

(5) TERT-2A-MUC1-2A-MSLN (XIII)

(6) TERT-2A-MSLN-2A-MUC1 (XIV)

wherein in each of formulas (IX)-(XIV: (i) MUC1, MSLN, and TERT represent a nucleotide sequence encoding an immunogenic MUC1 polypeptide, an immunogenic MSLN polypeptide, and an immunogenic TERT polypeptide, respectively, and (ii) 2A is a nucleotide sequence encoding a 2A peptide.

[0149] The immunogenic MSLN polypeptide encoded by a multi-antigen construct may be a full length MSLN protein or a fragment thereof, such as a cytoplasmic, secreted, or membrane-bound fragment. In some embodiments the multi-antigen construct comprises a nucleotide sequence encoding an immunogenic MSLN polypeptide selected from the group consisting of:

[0150] 1) a polypeptide comprising, or consisting of, amino acids 37-597 of the amino acid sequence of SEQ ID NO:2;

[0151] 2) a polypeptide comprising an amino acid sequence that is at least 90%, 95%, 98%, or 99% identical to the amino acid sequence consisting of amino acids 37-597 of the amino acid sequence of SEQ ID NO:2;

[0152] 3) a polypeptide comprising, or consisting of, the amino acid sequence of SEQ ID NO:6, or amino acids 4-564 of the amino acid sequence of SEQ ID NO:6; and

[0153] 4) polypeptide comprising an amino acid sequence that has at least 93%-99%, 94%-98%, or 94%-97% identity to the amino acid sequence of SEQ ID NO:8 (“Plasmid 1103 Polypeptide”).

[0154] In some particular embodiments the multi-antigen construct comprises a nucleotide sequence of SEQ ID NO:5 or a degenerate variant thereof.

[0155] The immunogenic MUC1 polypeptide encoded by a multi-antigen construct may comprise (1) an amino acid sequence of 3 to 30 tandem repeats of 20 amino acids of a human MUC1 protein and (2) the amino acid sequences of the human MUC1 protein that flank the VNTR region. In some embodiments the multi-antigen construct comprises a nucleotide sequence encoding an immunogenic MUC1 polypeptide, wherein the immunogenic MUC1 polypeptide comprises, or consists of, the amino acid sequence selected from the group consisting of:

[0156] (1) the amino acid sequence of SEQ ID NO:8 (Plasmid 1027 polypeptide);

[0157] (2) an amino acid sequence comprising amino acids 4-537 of SEQ ID NO:8;

[0158] (3) an amino acid sequence comprising amino acids 24-537 of SEQ ID NO:8;

[0159] (4) the amino acid sequence of SEQ ID NO:16 (Plasmid 1197 polypeptide);

[0160] (5) an amino acid sequence comprising amino acids 4-517 of SEQ ID NO:16; and

[0161] (6) an amino acid sequence comprising amino acids 4-517 of SEQ ID NO:16, with the proviso that the amino acid at position 513 is T.

[0162] In some particular embodiments, the multi-antigen construct comprises a nucleotide sequence of SEQ ID NO:7, a nucleotide sequence of SEQ ID NO:15, or a degenerate variant of the nucleotide sequence of SEQ ID NO:7 or 15.

[0163] The immunogenic TERT polypeptide encoded by a multi-antigen construct may be the full length protein or any truncated form. The full length TERT protein is expected to generate stronger immune responses than a truncated form. However, depending on the specific vector chosen to deliver the construct, the vector may not have the capacity to carry the gene encoding the full TERT protein. Therefore, deletions of some amino acids from the protein may be made such that the transgenes would fit into a particular vector. The deletions of amino acids can be made from the N-terminus, C-terminus, or anywhere in the sequence of the TERT protein. Additional deletions may be made in order to remove the nuclear localization signal, thereby rendering the polypeptides cytoplasmic, increasing access to cellular antigen processing/presentation machinery. In some embodiments, the amino acids up to position 200, 300, 400, 500, or 600 of the N-terminus of the TERT protein are absent from the immunogenic TERT polypeptides.

[0164] Mutations of additional amino acids may be introduced in order to inactivate the TERT catalytic domain. Examples of such mutations include D712A and V713T.

[0165] In some further embodiments, the multi-antigen construct comprises a nucleotide sequence encoding an immunogenic TERT polypeptide, wherein the immunogenic TERT polypeptide comprises, or consist of, an amino acid sequence selected from the group consisting of;

[0166] 1) the amino acid sequence of SEQ ID NO:10 (“Plasmid 1112 Polypeptide”; TERT 240);

[0167] 2) the amino acid sequence of SEQ ID NO:12 (“Plasmid 1330 Polypeptide”; TERT 541); and

[0168] 3) the amino acid sequence of SEQ ID NO: 14 (“Plasmid 1326 Polypeptide”; TERT 343).

[0169] In some particular embodiments, the multi-antigen construct comprises the nucleotide sequence of SEQ ID NO:9, 11, or 13, or a degenerate variant of the nucleotide sequence of SEQ ID NO:9, 11, or 13.

[0170] In some particular embodiments, the present disclosure provides a dual antigen construct encoding an immunogenic MUC1 polypeptide and an immunogenic MSLN polypeptide, which comprises a nucleotide sequence selected from the group consisting of:

[0171] (1) a nucleotide sequence encoding the amino acid sequence of SEQ ID NO:18, 20, 22, or 24;

[0172] (2) the nucleotide sequence of SEQ ID NO:17, 19, 21, or 23; and

[0173] (3) a degenerate variant of the nucleotide sequence of SEQ ID NO:17, 19, 21, or 23.

[0174] In some other particular embodiments, the present disclosure provides a dual antigen construct encoding an immunogenic MUC1 polypeptide and an immunogenic TERT polypeptide, which comprises a nucleotide sequence selected from the group consisting of:

[0175] (1) a nucleotide sequence encoding the amino acid sequence of SEQ ID NO:26, 28, 30, 32, or 34;

[0176] (2) a nucleotide sequence of SEQ ID NO:25, 27, 29, 31, or 33; and

[0177] (3) a degenerate variant of the nucleotide sequence of SEQ ID NO:25, 27, 29, 31, or 33.

[0178] In some other particular embodiments, the present disclosure provides a dual antigen construct encoding an immunogenic MSLN polypeptide and an immunogenic TERT polypeptide, which comprises a nucleotide sequence selected from the group consisting of:

[0179] (1) a nucleotide sequence encoding the amino acid sequence of SEQ ID NO:36, 38, 40, or 42;

[0180] (2) the nucleotide sequence of SEQ ID NO:35, 37, 39, or 41; and

[0181] (3) a degenerate variant of the nucleotide sequence of SEQ ID NO:35, 37, 39, or 41.

[0182] In some other particular embodiments, the present disclosure provides a triple-antigen construct encoding an immunogenic MUC1 polypeptide, an immunogenic MSLN polypeptide, and an immunogenic TERT polypeptide, which comprises a nucleotide sequence selected from the group consisting of:

[0183] (1) a nucleotide sequence encoding the amino acid sequence of SEQ ID NO:44, 46, 48, 50, 52, 54, 56, 58, 60, 62, 64, or 66;

[0184] (2) the nucleotide sequence of SEQ ID NO:43, 45, 47, 49, 51, 53, 55, 57, 59, 61, 63, or 65; and

[0185] (3) a degenerate variant of the nucleotide sequence of SEQ ID NO: 43, 45, 47, 49, 51, 53, 55, 57, 59, 61, 63, or 65.

### D. Vectors Containing a Nucleic Acid Molecule Encoding an Immunogenic TAA Polypeptide

[0186] Another aspect of the invention relates to vectors containing one or more of any of the nucleic acid molecules provided by the present disclosure, including single antigen constructs, dual-antigen constructs, triple-antigen constructs, and other multi-antigen constructs. The vectors are useful for cloning or expressing the immunogenic TAA polypeptides encoded by the nucleic acid molecules, or for delivering the nucleic acid molecule in a composition, such as a vaccine, to a host cell or to a host subject, such as a human. In some particular embodiments, the vector comprises a triple-antigen construct encoding an immunogenic MUC1 polypeptide, an immunogenic MSLN polypeptide, and an immunogenic TERT polypeptide, wherein the triple-antigen construct which comprises a nucleotide sequence selected from the group consisting of:

[0187] (1) a nucleotide sequence encoding the amino acid sequence of SEQ ID NO:44, 46, 48, 50, 52, 54, 56, 58, 60, 62, 64, or 66;

[0188] (2) the nucleotide sequence of SEQ ID NO:43, 45, 47, 49, 51, 53, 55, 57, 59, 61, 63, or 65; and

[0189] (3) a degenerate variant of the nucleotide sequence of SEQ ID NO: 43, 45, 47, 49, 51, 53, 55, 57, 59, 61, 63, or 65.

[0190] A wide variety of vectors may be prepared to contain and express a nucleic acid molecule of the invention, such as plasmid vectors, cosmid vectors, phage vectors, and viral vectors.

[0191] In some embodiments, the disclosure provides a plasmid-based vector containing a nucleic acid molecule of the invention. Examples of suitable plasmid vectors include pBR325, pUC18, pSKF, pET23D, and pGB-2. Other examples of plasmid vectors, as well as method of constructing such vectors, are described in U.S. Pat. Nos. 5,580,859, 5,589,466, 5,688,688, 5,814,482, and 5,580,859.

[0192] In other embodiments, the present invention provides vectors that are constructed from viruses, such as retroviruses, alphaviruses, and adenoviruses. Examples of retroviral vectors are described in U.S. Pat. Nos. 5,219,740, 5,716,613, 5,851,529, 5,591,624, 5,716,826, 5,716,832, and 5,817,491. Representative examples of vectors that can be generated from alphaviruses are described in U.S. Pat. Nos. 5,091,309 and 5,217,879, 5,843,723, and 5,789,245.

[0193] In some particular embodiments, the present disclosure provides adenoviral vectors that comprise a nucleic acid sequence of non-human primate adenoviruses, such as simian adenoviruses. Examples of such adenoviral vectors, as well as their preparation, are described in PCT application publications WO2005/071093 and WO 2010/086189, and include non-replicating vectors constructed from simian adenoviruses, such as ChAd3, ChAd4, ChAd5, ChAd7, ChAd8, ChAd9, ChAd10, ChAd11, ChAd16, ChAd17, ChAd19, ChAd20, ChAd22, ChAd24, ChAd26, ChAd30, ChAd31, ChAd37, ChAd38, ChAd44, ChAd63, ChAd68, ChAd82, ChAd55, ChAd73, ChAd83, ChAd146, ChAd147, PanAd1, Pan Ad2, and Pan Ad3, and replication-competent vectors constructed simian adenoviruses Ad4 or Ad7. It is preferred that in constructing the adenoviral vectors from the simian adenoviruses one or more of the early genes from the genomic region of the virus selected from E1A, E1B, E2A, E2B, E3, and E4 are either deleted or rendered non-functional by deletion or mutation. In a particular embodiment, the vector is constructed from ChAd3 or ChAd68. Suitable vectors can also be generated from other viruses such as: (1) pox viruses, such as canary pox virus or vaccinia virus (Fisher-Hoch et al., PNAS 86:317-321, 1989; Flexner et al., Ann. N.Y. Acad. Sci. 569:86-103, 1989; Flexner et al., Vaccine 8:17-21, 1990; U.S. Pat. Nos. 4,603,112, 4,769,330 and 5,017,487; WO 89/01973); (2) SV40 (Mulligan et al., Nature 277:108-114, 1979); (3) herpes (Kit, Adv. Exp. Med. Biol. 215:219-236, 1989; U.S. Pat. No. 5,288,641); and (4) lentivirus such as HIV (Poznansky, J. Virol. 65:532-536, 1991).

[0194] Methods of constructing vectors are well known in the art. Expression vectors typically include one or more control elements that are operatively linked to the nucleic acid sequence to be expressed. The term “control elements” refers collectively to promoter regions, polyadenylation signals, transcription termination sequences, upstream regulatory domains, origins of replication, internal ribosome entry sites (“IRES”), enhancers, and the like, which collectively provide for the replication, transcription, and translation of a coding sequence in a recipient cell. Not all of these control elements need always be present so long as the selected coding sequence is capable of being replicated, transcribed, and translated in an appropriate host cell. The control elements are selected based on a number of factors known to those skilled in that art, such as the specific host cells and source or structures of other vector components. For enhancing the expression of an immunogenic TAA polypeptide, a Kozak sequence may be provided upstream of the sequence encoding the immunogenic TAA polypeptide. For vertebrates, a known Kozak sequence is (GCC)NCCATGG, wherein N is A or G and GCC is less conserved. Exemplary Kozak sequences that may be used include GAACATGG, ACCAUGG and ACCATGG.

### E. Compositions Comprising an Immunogenic TAA Polypeptide (Polypeptide Compositions)

[0195] In another aspect, the present disclosure provides polypeptide compositions, which comprise one or more isolated immunogenic TAA polypeptides provided by the present disclosure (“polypeptide composition”). In some embodiments, the polypeptide composition is an immunogenic composition useful for eliciting an immune response against a TAA protein in a subject, such as a mouse, dog, nonhuman primates or human. In some other embodiments the polypeptide composition is a pharmaceutical composition for administration to a subject, such as a human. In still other embodiments, the polypeptide composition is a vaccine composition useful for immunization of a mammal, such as a human, for inhibiting abnormal cell proliferation, for providing protection against the development of cancer (used as a prophylactic), or for treatment of disorders (used as a therapeutic) associated with TAA over expression, such as cancers.

[0196] A polypeptide composition provided by the present disclosure may contain a single type of immunogenic TAA polypeptide, such an immunogenic MSLN polypeptide, an immunogenic MUC1 polypeptide, or an immunogenic TERT polypeptide. A composition may also contain a combination of two or more different types of immunogenic TAA polypeptides. For example, a polypeptide composition may contain immunogenic TAA polypeptides in any of the following combinations:

[0197] 1) an immunogenic MSLN polypeptide and an immunogenic MUC1 polypeptide;

[0198] 2) an immunogenic MSLN polypeptide and a TERT polypeptide; or

[0199] 3) an immunogenic MSLN polypeptide, an immunogenic MUC1 polypeptide, and a TERT polypeptide.

[0200] In some embodiments, a polypeptide composition provided by the present disclosure, such as an immunogenic composition, a pharmaceutical composition, or a vaccine composition, further comprises a pharmaceutically acceptable excipient. Pharmaceutically acceptable excipients suitable for immunogenic, pharmaceutical, or vaccine compositions are known in the art. Examples of suitable excipients that may be used in the compositions include biocompatible oils, such as rape seed oil, sunflower oil, peanut oil, cotton seed oil, jojoba oil, squalan, squalene, physiological saline solution, preservatives and osmotic pressure controlling agents, carrier gases, pH-controlling agents, organic solvents, hydrophobic agents, enzyme inhibitors, water absorbing polymers, surfactants, absorption promoters, pH modifiers, and anti-oxidative agents.

[0201] The immunogenic TAA polypeptide in a composition, particularly an immunogenic composition or a vaccine composition, may be linked to, conjugated to, or otherwise incorporated into a carrier for administration to a subject. The term “carrier” refers to a substance or structure that an immunogenic polypeptide can be attached to or otherwise associated with for delivery of the immunogenic polypeptide to the subject. The carrier itself may be immunogenic. Examples of carriers include immunogenic polypeptides, immune CpG islands, limpet hemocyanin (KLH), tetanus toxoid (TT), cholera toxin subunit B (CTB), bacteria or bacterial ghosts, liposome, chitosome, virosomes, microspheres, dendritic cells, or their like. One or more immunogenic TAA polypeptide molecules may be linked to a single carrier molecule. Methods for linking an immunogenic polypeptide to a carrier are known in the art,

[0202] A vaccine composition or immunogenic composition provided by the present disclosure may be used in conjunction or combination with one or more immune modulators or adjuvants. The immune modulators or adjuvants may be formulated separately from the vaccine composition or immunogenic composition, or they may be part of the same composition formulation. Thus, in some embodiments, the present disclosure provides a vaccine composition that further comprises one or more immune modulators or adjuvants. Examples of immune modulators and adjuvants are provided herein below.

[0203] The polypeptide compositions, including the immunogenic and vaccine compositions, can be prepared in any suitable dosage forms, such as liquid forms (e.g., solutions, suspensions, or emulsions) and solid forms (e.g., capsules, tablets, or powder), and by methods known to one skilled in the art.

### F. Compositions Comprising an Immunogenic Taa Nucleic Acid Molecule (Nucleic Acid Compositions)

[0204] The present disclosure also provides nucleic acid compositions, which comprise an isolated nucleic acid molecule or vector provided by the present disclosure (“nucleic acid composition”). The nucleic acid compositions are useful for eliciting an immune response against a TAA protein in vitro or in vivo in a subject, including a human. In some embodiments, the nucleic acid compositions are immunogenic compositions or pharmaceutical compositions.

[0205] In some particular embodiments, the nucleic acid composition is a DNA vaccine composition for administration to a subject, such as a human for (1) inhibiting abnormal cell proliferation, providing protection against the development of cancer (used as a prophylactic), (2) treatment of cancer (used as a therapeutic) associated with TAA over-expression, or (3) eliciting an immune response against a particular human TAA, such as MSLN, MUC1, or TERT. The nucleic acid molecule in the composition may be a “naked” nucleic acid molecule, i.e., simply in the form of an isolated DNA free from elements that promote transfection or expression. Alternatively, the nucleic acid molecule in the composition is incorporated into a vector, such as a plasmid vector or a viral vector.

[0206] A nucleic acid composition provided by the present disclosure may comprise individual isolated nucleic acid molecules that each encode only one type of immunogenic TAA polypeptide, such as an immunogenic MSLN polypeptide, an immunogenic MUC1 polypeptide, or an immunogenic TERT polypeptide.

[0207] A nucleic acid composition may comprise a multi-antigen construct that encodes two or more types of immunogenic TAA polypeptides. For example, a multi-antigen construct may encode two or more immunogenic TAA polypeptides in any of the following combinations:

[0208] (1) an immunogenic MSLN polypeptide and an immunogenic MUC1 polypeptide;

[0209] (2) an immunogenic MSLN polypeptide and an immunogenic TERT polypeptide;

[0210] (3) an immunogenic MUC1 polypeptide and an immunogenic TERT polypeptide; and

[0211] (4) an immunogenic MSLN polypeptide, an immunogenic MUC1 polypeptide, and an immunogenic TERT polypeptide.

[0212] In some particular embodiments, the compositions provided by the present disclosure comprise a dual antigen construct comprising a nucleotide sequence selected from the group consisting of:

[0213] (1) a nucleotide sequence encoding the amino acid sequence of SEQ ID NO:18, 20, 22, or 24, 26, 28, 30, 32, or 34, 36, 38, 30, 40, or 42;

[0214] (2) the nucleotide sequence of SEQ ID NO:17, 19, 21, or 23, 25, 27, 29, 31, or 33, 35, 37, 39, or 41; and

[0215] (3) a degenerate variant of the nucleotide sequence of SEQ ID NO:17, 19, 21, or 23, 25, 27, 29, 31, or 33, 35, 37, 39, or 41.

[0216] In some other particular embodiments, the compositions provided by the present disclosure comprise a triple-antigen construct comprising a nucleotide sequence selected from the group consisting of:

[0217] (1) a nucleotide sequence encoding the amino acid sequence of SEQ ID NO:44, 46, 48, 50, 52, 54, 56, 58, 60, 62, 64, or 66;

[0218] (2) the nucleotide sequence of SEQ ID NO:43, 45, 47, 49, 51, 53, 55, 57, 59, 61, 63, or 65; and

[0219] (3) a degenerate variant of the nucleotide sequence of SEQ ID NO: 43, 45, 47, 49, 51, 53, 55, 57, 59, 61, 63, or 65.

[0220] The nucleic acid compositions, such as a pharmaceutical composition or a DNA vaccine composition, may further comprise a pharmaceutically acceptable excipient. Pharmaceutical acceptable excipients suitable for nucleic acid compositions, including DNA vaccine compositions, are well known to those skilled in the art. Such excipients may be aqueous or nonaqueous solutions, suspensions, and emulsions. Examples of non-aqueous excipients include propylene glycol, polyethylene glycol, vegetable oils such as olive oil, and injectable organic esters such as ethyl oleate. Examples of aqueous excipient include water, alcoholic/aqueous solutions, emulsions or suspensions, including saline and buffered media. Suitable excipients also include agents that assist in cellular uptake of the polynucleotide molecule. Examples of such agents are (i) chemicals that modify cellular permeability, such as bupivacaine, (ii) liposomes or viral particles for encapsulation of the polynucleotide, or (iii) cationic lipids or silica, gold, or tungsten microparticles which associate themselves with the polynucleotides. Anionic and neutral liposomes are well-known in the art (see, e.g., Liposomes: A Practical Approach, RPC New Ed, IRL press (1990), for a detailed description of methods for making liposomes) and are useful for delivering a large range of products, including polynucleotides. Cationic lipids are also known in the art and are commonly used for gene delivery. Such lipids include Lipofectin™ also known as DOTMA (N-D-(2,3-dioleyloxy) propyls N,N, N-trimethylammonium chloride), DOTAP (1,2-bis (oleyloxy)-3 (trimethylammonio) propane), DDAB (dimethyldioctadecyl-ammonium bromide), DOGS (dioctadecylamidologlycyl spermine) and cholesterol derivatives such as DCChol (3 beta-(N—(N′,N′-dimethyl aminomethane)-carbamoyl) cholesterol). A description of these cationic lipids can be found in EP 187,702, WO 90/11092, U.S. Pat. No. 5,283,185, WO 91/15501, WO 95/26356, and U.S. Pat. No. 5,527,928. A particular useful cationic lipid formulation that may be used with the nucleic acid compositions provided by the disclosure is VAXFECTIN, which is a commixture of a cationic lipid (GAP-DMORIE) and a neutral phospholipid (DPyPE) which, when combined in an aqueous vehicle, self-assemble to form liposomes. Cationic lipids for gene delivery are preferably used in association with a neutral lipid such as DOPE (dioleyl phosphatidylethanolamine), as described in WO 90/11092 as an example. In addition, a nucleic acid construct, such as a DNA construct, can also be formulated with a nonionic block copolymer such as CRL1005.

[0221] A nucleic acid composition provided by the present disclosure, such as a pharmaceutical composition or immunogenic composition, may be used in conjunction or combination with one or more immune modulators. The nucleic acid composition, such as a pharmaceutical composition or immunogenic composition, may also be used in conjunction or combination with one or more adjuvants. Further, the nucleic acid composition may be used in conjunction or combination with one or more immune modulators and one or more adjuvants. The immune modulators or adjuvants may be formulated separately from the nucleic composition, or they may be part of the same composition formulation. Thus, in some embodiments, the present disclosure provides a nucleic acid vaccine composition that further comprises one or more immune modulators and/or one or more adjuvants. Examples of immune modulators and adjuvants are provided herein below.

[0222] The nucleic acid compositions, including vaccine compositions, can be prepared in any suitable dosage forms, such as liquid forms (e.g., solutions, suspensions, or emulsions) and solid forms (e.g., capsules, tablets, or powder), and by methods known to one skilled in the art.

### G. Uses of the Immunogenic TAA Polypeptides, Nucleic Acid Molecules, and Compositions

[0223] In other aspects, the present disclosure provides methods of using the immunogenic TAA polypeptides, isolated nucleic acid molecules, and compositions described herein above. In one aspect, the present disclosure provides a method of eliciting an immune response against a TAA in a subject, particularly a human, comprising administering to the subject an effective amount of (1) an immunogenic TAA polypeptide that is immunogenic against the target TAA, (2) an isolated nucleic acid molecule encoding one or more immunogenic TAA polypeptides, (3) a composition comprising one or more immunogenic TAA polypeptides, or (4) a composition comprising an isolated nucleic acid molecule encoding one or more immunogenic TAA polypeptides. In some embodiments, the disclosure provides a method of eliciting an immune response against MSLN in a subject, comprising administering to the subject an effective amount of an immunogenic MSLN composition provided by the present disclosure, wherein the immunogenic MSLN composition is selected from: (1) an immunogenic MSLN polypeptide, (2) an isolated nucleic acid molecule encoding an immunogenic MSLN polypeptide, (3) a composition comprising an immunogenic MSLN polypeptide, or (4) a composition comprising an isolated nucleic acid molecule encoding an immunogenic MSLN polypeptide. In some other embodiments, the disclosure provides a method of eliciting an immune response against MUC1 in a subject, comprising administering to the subject an effective amount of an immunogenic MUC1 composition provided by the present disclosure, wherein the immunogenic MUC1 composition is selected from: (1) an immunogenic MUC1 polypeptide, (2) an isolated nucleic acid molecule encoding an immunogenic MUC1 polypeptide, (3) a composition comprising an immunogenic MUC1 polypeptide, or (4) a composition comprising an isolated nucleic acid molecule encoding an immunogenic MUC1 polypeptide. In some embodiments, the disclosure provides a method of eliciting an immune response against TERT in a subject, comprising administering to the subject an effective amount of an immunogenic TERT composition provided by the present disclosure, wherein the immunogenic TERT composition is selected from: (1) an immunogenic TERT polypeptide, (2) an isolated nucleic acid molecule encoding an immunogenic TERT polypeptide, (3) a composition comprising an immunogenic TERT polypeptide, or (4) a composition comprising an isolated nucleic acid molecule encoding an immunogenic TERT polypeptide.

[0224] In another aspect, the present disclosure provides a method of inhibiting abnormal cell proliferation in a human, wherein the abnormal cell proliferation is associated with over-expression of a TAA. The method comprises administering to the human an effective amount of immunogenic TAA composition provided by the present disclosure that is immunogenic against the over-expressed TAA. The immunogenic TAA composition may be (1) an immunogenic TAA polypeptide, (2) an isolated nucleic acid molecule encoding one or more immunogenic TAA polypeptides, (3) a composition comprising an immunogenic TAA polypeptide, or (4) a composition comprising an isolated nucleic acid molecule encoding one or more immunogenic TAA polypeptides. The abnormal cell proliferation may be in any organ or tissues of a human, such as breast, stomach, ovaries, lungs, bladder, large intestine (e.g., colon and rectum), kidneys, pancreas, and prostate. In some embodiments, the method is for inhibiting abnormal cell proliferation in the breast, ovaries, pancreas, colon, lung, stomach, and rectum.

[0225] In another aspect, the present disclosure provides a method of treating cancer in a human wherein the cancer is associated with over-expression of a TAA. The method comprises administering to the human an effective amount of immunogenic TAA composition capable of eliciting an immune response against the over-expressed TAA. The immunogenic TAA composition may be (1) an immunogenic TAA polypeptide, (2) an isolated nucleic acid molecule encoding one or more immunogenic TAA polypeptides, (3) a composition comprising an immunogenic TAA polypeptide, or (4) a composition comprising an isolated nucleic acid molecule encoding one or more immunogenic TAA polypeptides.

[0226] In some embodiments, the disclosure provides a method of treating a cancer in a human, comprising administering to the human an effective amount of a nucleic acid composition provided herein above. The nucleic acids in the composition may be a single-antigen construct encoding only one particular immunogenic TAA polypeptide, such as an immunogenic MSLN polypeptide, an immunogenic MUC1 polypeptide, or an immunogenic TERT polypeptide. The nucleic acids in the composition may also be a multi-antigen construct encoding two, three, or more different immunogenic TAA polypeptides. In some specific embodiments, the disclosure provides a method of treating a cancer in a human, comprising administering to the human an effective amount of a composition comprising a dual-antigen construct. The dual-antigen construct may encode any two different immunogenic TAA polypeptides selected from: (1) an immunogenic MSLN polypeptide and an immunogenic MUC1 polypeptide; (2) an immunogenic MSLN polypeptide and an immunogenic TERT polypeptide; (3) an immunogenic TERT polypeptide and an immunogenic MUC1 polypeptide.

[0227] In some other specific embodiments, the disclosure provides a method of treating a cancer in a human, wherein the cancer is associated with over-expression of one or more TAAs selected from MUC1, MSLN, and TERT, which method comprises administering to the human an effective amount of a composition comprising a triple-antigen construct encoding an immunogenic MSLN polypeptide, an immunogenic MUC1 polypeptide, and an immunogenic TERT polypeptide.

[0228] Any cancer that over-expresses the tumor-associate antigen MUC1, MSLN, and/or TERT may be treated by a method provided by the present disclosure. Examples of cancers include breast cancer, ovarian cancer, lung cancer (such as small cell lung cancer and non-small cell lung cancer), colorectal cancer, gastric cancer, and pancreatic cancer. In some particular embodiments, the present disclosure provide a method of treating cancer in a human, which comprises administering to the human an effective amount of a composition comprising a triple-antigen construct, wherein the cancer is (1) breast cancer, such as triple-negative breast cancer, (2) pancreatic cancer, such as pancreatic ductal adenocarcinoma, or (3) ovarian cancer, such as ovarian adenocarcinoma.

[0229] The polypeptide and nucleic acid compositions can be administered to a subject, including human (such as a human patient), by a number of suitable methods known in the art. Examples of suitable methods include: (1) intramuscular, intradermal, intraepidermal, or subcutaneous administration, (2) oral administration, and (3) topical application (such as ocular, intranasal, and intravaginal application). One particular method of intradermal or intraepidermal administration of a nucleic acid composition that may be used is gene gun delivery using the Particle Mediated Epidermal Delivery (PMED™) DNA delivery device marketed by PowderMed. PMED is a needle-free method of administering DNAs to animals or humans. The PMED system involves the precipitation of DNA onto microscopic gold particles that are then propelled by helium gas into the epidermis. The DNA-coated gold particles are delivered to the APCs and keratinocytes of the epidermis, and once inside the nuclei of these cells, the DNA elutes off the gold and becomes transcriptionally active, producing encoded protein. One particular method for intramuscular administration of a nucleic acid composition is electroporation. Electroporation uses controlled electrical pulses to create temporary pores in the cell membrane, which facilitates cellular uptake of the nucleic acid composition injected into the muscle. Where a CpG is used in combination with a nucleic acid composition, the CpG and nucleic acid composition may be co-formulated in one formulation and the formulation is administered intramuscularly by electroporation.

[0230] The effective amount of the immunogenic TAA polypeptide or nucleic acid encoding an immunogenic TAA polypeptide in the composition to be administered to a subject, such as human patient, a given method provided by the present disclosure can be readily determined by a person skilled in the art and will depend on a number of factors. In a method of treating cancer, such as pancreatic cancer, ovarian cancer, and breast cancer, factors that may be considered in determining the effective amount of the immunogenic TAA polypeptide or nucleic acid include, but not limited: (1) the subject to be treated, including the subject's immune status and health, (2) the severity or stage of the cancer to be treated, (3) the specific immunogenic TAA polypeptides used or expressed, (4) the degree of protection or treatment desired, (5) the administration method and schedule, and (6) other therapeutic agents (such as adjuvants or immune modulators) used. In the case of nucleic acid vaccine compositions, including the multi-antigen vaccine compositions, the method of formulation and delivery are among the key factors for determining the dose of the nucleic acid required to elicit an effective immune response. For example, the effective amounts of the nucleic acid may be in the range of 2 μg/dose-10 mg/dose when the nucleic acid vaccine composition is formulated as an aqueous solution and administered by hypodermic needle injection or pneumatic injection, whereas only 16 ng/dose-16 μg/dose may be required when the nucleic acid is prepared as coated gold beads and delivered using a gene gun technology. The dose range for a nucleic acid vaccine by electroporation is generally in the range of 0.5-10 mg/dose. In the case where the nucleic acid vaccine is administered together with a CpG by electroporation in a co-formulation, the dose of the nucleic acid vaccine may be in the range of 0.5-5 mg/dose and the dose of CpG is typically in the range of 0.05 mg-5 mg/dose, such as 0.05, 0.2, 0.6, or 1.2 mg/dose per person. The nucleic acid or polypeptide vaccine compositions of the present invention can be used in a prime-boost strategy to induce robust and long-lasting immune response. Priming and boosting vaccination protocols based on repeated injections of the same immunogenic construct are well known. In general, the first dose may not produce protective immunity, but only “primes” the immune system. A protective immune response develops after the second or third dose (the “boosts”). The boosts are performed according to conventional techniques, and can be further optimized empirically in terms of schedule of administration, route of administration, choice of adjuvant, dose, and potential sequence when administered with another vaccine. In one embodiment, the nucleic acid or polypeptide vaccines of the present invention are used in a conventional homologous prime-boost strategy, in which the same vaccine is administered to the animal in multiple doses. In another embodiment, the nucleic acid or polypeptide vaccine compositions are used in a heterologous prime-boost vaccination, in which different types of vaccines containing the same antigens are administered at predetermined time intervals. For example, a nucleic acid construct may be administered in the form of a plasmid in the initial dose (“prime”) and as part of a vector in the subsequent doses (“boosts”), or vice versa.

[0231] The polypeptide or nucleic acid immunogenic compositions of the present disclosure may be used together with one or more adjuvants. Examples of suitable adjuvants include: (1) oil-in-water emulsion formulations (with or without other specific immunostimulating agents such as muramyl polypeptides or bacterial cell wall components), such as (a) MF59™ (PCT Publication No. WO 90/14837; Chapter 10 in Vaccine design: the subunit and adjuvant approach, eds. Powell & Newman, Plenum Press 1995), containing 5% Squalene, 0.5% Tween 80 (polyoxyethylene sorbitan mono-oleate), and 0.5% Span 85 (sorbitan trioleate) formulated into submicron particles using a microfluidizer, (b) SAF, containing 10% Squalene, 0.4% Tween 80, 5% pluronic-blocked polymer L121, and thr-MDP either microfluidized into a submicron emulsion or vortexed to generate a larger particle size emulsion, and (c) RIBI™ adjuvant system (RAS) (Ribi Immunochem, Hamilton, Mont.) containing 2% Squalene, 0.2% Tween 80, and one or more bacterial cell wall components such as monophosphorylipid A (MPL), trehalose dimycolate (TDM), and cell wall skeleton (CWS), (2) saponin adjuvants, such as QS21, STIMULON™ (Cambridge Bioscience, Worcester, Mass.), Abisco® (Isconova, Sweden), or Iscomatrix® (Commonwealth Serum Laboratories, Australia); (3) Complete Freund's Adjuvant (CFA) and Incomplete Freund's Adjuvant (IFA); (4) cytokines, such as interleukins (e.g. IL-1, IL-2, IL-4, IL-5, IL-6, IL-7, IL-12 (PCT Publication No. WO 99/44636), etc.), interferons (e.g. gamma interferon), macrophage colony stimulating factor (M-CSF), and tumor necrosis factor (TNF); (5) monophosphoryl lipid A (MPL) or 3-O-deacylated MPL (3dMPL), (WO 00/56358); (6) combinations of 3dMPL with QS21 and/or oil-in-water emulsions (EP-A-0835318, EP-A-0735898, EP-A-0761231); (7) oligonucleotides comprising CpG motifs, i.e. containing at least one CG dinucleotide, where the cytosine is unmethylated (WO 98/40100, WO 98/55495, WO 98/37919 and WO 98/52581); (8) a polyoxyethylene ether or a polyoxyethylene ester (WO 99/52549); (9) a polyoxyethylene sorbitan ester surfactant in combination with an octoxynol (WO 01/21207) or a polyoxyethylene alkyl ether or ester surfactant in combination with at least one additional non-ionic surfactant such as an octoxynol (WO 01/21152); (10) a saponin and an immunostimulatory oligonucleotide (e.g. a CpG oligonucleotide) (WO 00/62800); (11) metal salt, including aluminum salts (also known as alum), such as aluminum phosphate and aluminum hydroxide; (12) a saponin and an oil-in-water emulsion (WO 99/11241); and (13) a combination of saponin (e.g. QS21), 3dMPL, and IM2 (WO 98/57659).

[0232] Further, for the treatment of a neoplastic disorder, including a cancer, in a subject, such as a human patient, the polypeptide or nucleic acid compositions, including vaccine compositions, provided by the present disclosure may be administered in combination with one or more immune modulators. The immune modulator may be an immune-suppressive-cell inhibitor (ISC inhibitor) or an immune-effector-cell enhancer (IEC enhancer). Further, one or more ISC inhibitors may be used in combination with one or more IEC enhancers. The immune modulators may be administered by any suitable methods and routes, including (1) systemic administration such as intravenous, intramuscular, or oral administration, and (2) local administration such intradermal and subcutaneous administration. Where appropriate or suitable, local administration is generally preferred over systemic administration. Local administration of any immune modulators can be carried out at any location of the body of the subject that is suitable for local administration of pharmaceuticals; however, it is more preferable that these immune modulators are administered locally at close proximity to the vaccine draining lymph node.

[0233] The compositions, such as a vaccine, may be administered simultaneously or sequentially with any or all of the immune modulators used. Similarly, when two or more immune modulators are used, they may be administered simultaneously or sequentially with respect to each other. In some embodiments, a vaccine is administered simultaneously (e.g., in a mixture) with respect to one immune modulator, but sequentially with respect to one or more additional immune modulators. Co-administration of the vaccine and the immune modulators can include cases in which the vaccine and at least one immune modulator are administered so that each is present at the administration site, such as vaccine draining lymph node, at the same time, even though the antigen and the immune modulators are not administered simultaneously. Co-administration of the vaccine and the immune modulators also can include cases in which the vaccine or the immune modulator is cleared from the administration site, but at least one cellular effect of the cleared vaccine or immune modulator persists at the administration site, such as vaccine draining lymph node, at least until one or more additional immune modulators are administered to the administration site. In cases where a nucleic acid vaccine is administered in combination with a CpG, the vaccine and CpG may be contained in a single formulation and administered together by any suitable method. In some embodiments, the nucleic acid vaccine and CpG in a co-formulation (mixture) is administered by intramuscular injection in combination with electroporation.

[0234] In some embodiments, the immune modulator that is used in combination with the polypeptide or nucleic acid composition is an ISC inhibitor. Examples of SIC inhibitors include (1) protein kinase inhibitors, such as imatinib, sorafenib, lapatinib, BIRB-796, and AZD-1152, AMG706, Zactima (ZD6474), MP-412, sorafenib (BAY 43-9006), dasatinib, CEP-701 (lestaurtinib), XL647, XL999, Tykerb (lapatinib), MLN518, (formerly known as CT53518), PKC412, ST1571, AEE 788, OSI-930, OSI-817, sunitinib malate (SUTENT), axitinib (AG-013736), erlotinib, gefitinib, axitinib, bosutinib, temsirolismus and nilotinib (AMN107). In some particular embodiments, the tyrosine kinase inhibitor is sunitinib, sorafenib, or a pharmaceutically acceptable salt or derivative (such as a malate or a tosylate) of sunitinib or sorafenib; (2) cyclooxygenase-2 (COX-2) inhibitors, such as celecoxib and rofecoxib; (3) phosphodiesterase type 5 (PDES) inhibitors, such as Examples of PDES inhibitors include avanafil, lodenafil, mirodenafil, sildenafil, tadalafil, vardenafil, udenafil, and zaprinast, and (4) DNA crosslinkers, such as cyclophosphamide.

[0235] In some embodiments, the immune modulator that is used in combination with the polypeptide or nucleic acid composition is an IEC enhancer. Two or more IEC enhancers may be used together. Examples of IEC enhancers that may be used include: (1) TNFR agonists, such as agonists of OX40, 4-1BB (such as BMS-663513), GITR (such as TRX518), and CD40 (such as CD40 agonistic antibodies); (2) CTLA-4 inhibitors, such as is Ipilimumab and Tremelimumab; (3) TLR agonists, such as CpG 7909 (5′ TCGTCGTTTTGTCGTTTTGTCGTT3′), CpG 24555 (5′ TCGTCGTTTTTCGGTGCTTTT3′ (CpG 24555); and CpG 10103 (5′ TCGTCGTTTTTCGGTCGTTTT3′); (4) programmed cell death protein 1 (PD-1) inhibitors, such as nivolumab and pembrolizumab; and (5) PD-L1 inhibitors, such as atezolizumab, durvalumab, and velumab; and (6) 001 inhibitors.

[0236] In some embodiments, the IEC enhancer is CD40 agonist antibody, which may be a human, humanized or part-human chimeric anti-CD40 antibody. Examples of specific CD40 agonist antibodies include the G28-5, mAb89, EA-5 or S2C6 monoclonal antibody, and CP870,893. CP-870,893 is a fully human agonistic CD40 monoclonal antibody (mAb) that has been investigated clinically as an anti-tumor therapy. The structure and preparation of CP870,893 is disclosed in WO2003041070 (where the antibody is identified by the internal identified “21.4.1” and the amino acid sequences of the heavy chain and light chain of the antibody are set forth in SEQ ID NO: 40 and SEQ ID NO: 41, respectively). For use in combination with a composition present disclosure, CP-870,893 may be administered by any suitable route, such as intradermal, subcutaneous, or intramuscular injection. The effective amount of CP870893 is generally in the range of 0.01-0.25 mg/kg. In some embodiment, CP870893 is administered at an amount of 0.05-0.1 mg/kg.

[0237] In some other embodiments, the IEC enhancer is a CTLA-4 inhibitor, such as Ipilimumab and Tremelimumab. Ipilimumab (also known as MEX-010 or MDX-101), marketed as YERVOY, is a human anti-human CTLA-4 antibody. Ipilimumab can also be referred to by its CAS Registry No. 477202-00-9, and is disclosed as antibody 10DI in PCT Publication No. WO 01/14424. Tremelimumab (also known as CP-675,206) is a fully human IgG2 monoclonal antibody and has the CAS number 745013-59-6. Tremelimumab is disclosed in U.S. Pat. No. 6,682,736, incorporated herein by reference in its entirety, where it is identified as antibody 11.2.1 and the amino acid sequences of its heavy chain and light chain are set forth in SEQ ID NOs:42 and 43, respectively. For use in combination with a composition provided by the present disclosure, Tremelimumab may be administered locally, particularly intradermally or subcutaneously. The effective amount of Tremelimumab administered intradermally or subcutaneously is typically in the range of 5-200 mg/dose per person. In some embodiments, the effective amount of Tremelimumab is in the range of 10-150 mg/dose per person per dose. In some particular embodiments, the effective amount of Tremelimumab is about 10, 25, 50, 75, 100, 125, 150, 175, or 200 mg/dose per person.

[0238] In some other embodiments, the immune modulator is a PD-1 inhibitor or PD-L1 inhibitor, such as nivolumab, pembrolizumab, RN888 (anti-PD-1 antibody), Atezolizumab (PD-L1-specific mAbs from Roche), Durvalumab (PD-L1-specific mAbs from Astra Zeneca), and Avelumab (PD-L1-specific mAbs from Merck). (Okazaki T et al., International Immunology (2007); 19, 7:813-824, Sunshine J et al., Curr Opin Pharmacol. 2015 August; 23:32-8).

[0239] In other embodiments, the present disclosure provides use of an immune modulator with a vaccine, including anti-cancer vaccines, wherein the immune modulator is an inhibitor of indoleamine 2,3-dioxygenase 1 (also known as “IDO1”). IDO1 was found to modulate immune cell function to a suppressive phenotype and was, therefore, believed to partially account for tumor escape from host immune surveillance. The enzyme degrades the essential amino acid tryptophan into kynurenine and other metabolites. It was found that these metabolites and the paucity of tryptophan leads to suppression of effector T-cell function and augmented differentiation of regulatory T cells. The IDO1 inhibitors may be large molecules, such as an antibody, or a small molecule, such as a chemical compound.

[0240] In some particular embodiments, the polypeptide or nucleic acid composition provided by the present disclosure is used in combination with a 1,2,5-oxadiazole derivative IDO1 inhibitor disclosed in WO2010/005958. Examples of specific 1,2,5-oxadiazole derivative IDO1 inhibitors include the following compounds:
[0241] 4-({2-[(aminosulfonyl)amino]ethyl}amino)-N-(3-bromo-4-fluorophenyl)-N′-hydroxy-1,2,5-oxadiazole-3-carboximidamide;
[0242] 4-({2 [(aminosulfonyl)amino]ethyl} amino)-N-(3-chloro-4-fluorophenyl)-N′-hydroxy-1,2,5-oxadiazole 3-carboximidamide;
[0243] 4-({2 [(aminosulfonyl)amino] ethyl} amino)-N-[4-fluoro-3-(trifluoromethyl)phenyl]-N′-hydroxy-1,2,5 oxadiazole-3-carboximidamide;
[0244] 4-({2 [(aminosulfonyl)amino] ethyl} amino)-N′-hydroxy-N-[3-(trifluoromethyl)phenyl]-1,2,5 oxadiazole-3-carboximidamide;
[0245] 4-({2 [(aminosulfonyl)amino]ethyl} amino)-N-(3-cyano-4-fluorophenyl)-N′-hydroxy-1,2,5-oxadiazole 3-carboximidamide;
[0246] 4-({2 [(aminosulfonyl)amino] ethyl} amino)-N-[(4-bromo-2-furyl)methyl]-N′-hydroxy-1,2,5 oxadiazole-3-carboximidamide; or
[0247] 4-({2 [(aminosulfonyl)amino] ethyl} amino)-N-[(4-chloro-2-furyl)methyl]-N′-hydroxy-1,2,5 oxadiazole-3-carboximidamide.

[0248] The 1,2,5-oxadiazole derivative IDO1 inhibitors are typically administered orally once or twice per day and effective amount by oral administration is generally in the range of 25 mg-1000 mg per dose per patient, such as 25 mg, 50 mg, 100 mg, 200 mg, 300 mg, 400 mg, 500 mg, 600 mg, 700 mg, 800 mg, or 1000 mg. In a particular embodiment, the polypeptide or nucleic acid composition provided by the present disclosure is used in combination with 4-({2-[(aminosulfonyl)amino]ethyl}amino)-N-(3-bromo-4-fluorophenyl)-N′-hydroxy-1,2,5-oxadiazole-3-carboximidamide administered orally twice per day at 25 mg or 50 mg per dose. The 1,2,5-oxadiazole derivatives may be synthesized as described in U.S. Pat. No. 8,088,803, which is incorporated herein by reference in its entirety.

[0249] In some other specific embodiments, the polypeptide or nucleic acid composition provided by the present disclosure is used in combination with a pyrrolidine-2,5-dione derivative IDO1 inhibitor disclosed in WO2015/173764. Examples of specific pyrrolidine-2,5-dione derivative inhibitors include the following compounds:
[0250] 3-(5-fluoro-1H-indol-3-yl)pyrrolidine-2,5-dione,
[0251] (3-²H)-3-(5-fluoro-1H-indol-3-yl)pyrrolidine-2,5-dione;
[0252] (−)-(R)-3-(5-fluoro-1H-indol-3-yl)pyrrolidine-2,5-dione;
[0253] 3-(1H-indol-3-yl)pyrrolidine-2,5-dione;
[0254] (−)-(R)-3-(1H-indol-3-yl)pyrrolidine-2,5-dione;
[0255] 3-(5-chloro-1H-indol-3-yl)pyrrolidine-2,5-dione;
[0256] (−)-(R)-3-(5-chloro-1H-indol-3-yl)pyrrolidine-2,5-dione;
[0257] 3-(5-bromo-1H-indol-3-yl)pyrrolidine-2,5-dione;
[0258] 3-(5,6-difluoro-1H-indol-3-yl)pyrrolidine-2,5-dione; and
[0259] 3-(6-chloro-1H-indol-3-yl)pyrrolidine-2,5-dione.

[0260] The pyrrolidine-2,5-dione derivative IDO1 inhibitors are typically administered orally once or twice per day and the effective amount by oral administration is generally in the range of 50 mg-1000 mg per dose per patient, such as 125 mg, 250 mg, 500 mg, 750 mg, or 1000 mg. In a particular embodiment, the polypeptide or nucleic acid composition provided by the present disclosure is used in combination with 3-(5-fluoro-1H-indol-3-yl)pyrrolidine-2,5-dione administered orally once per day at 125-100 mg per dose per patient. The pyrrolidine-2,5-dione derivatives may be synthesized as described in U.S. patent application publication US2015329525, which is incorporated herein by reference in its entirety.

### H. Examples

[0261] The following examples are provided to illustrate certain embodiments of the invention. They should not be construed to limit the scope of the invention in any way. From the above description and these examples, one skilled in the art can ascertain the essential characteristics of the invention, and without departing from the spirit and scope thereof, can make various changes and modifications of the invention to adapt it to various usage and conditions.

### Example 1. Construction of Single-Antigen, Dual-Antigen, and Triple-Antigen Constructs

[0262] Example 1 illustrates the construction of single antigen constructs, dual-antigen constructs, and triple antigen constructs. Unless as otherwise noted, reference to amino acid positions or residues of MUC1, MSLN, and TERT protein refers to the amino acid sequence of human MUC1 isoform 1 precursor protein as set forth in SEQ ID NO:1, amino acid sequence of human mesothelin (MSLN) isoform 2 precursor protein as set forth in SEQ ID NO:2, and the amino acid sequence of human TERT isoform 1 precursor protein as set forth in SEQ ID NO:3, respectively.

[0263] 1A. Single-Antigen Constructs

[0264] Plasmid 1027 (MUC1).

[0265] Plasmid 1027 was generated using the techniques of gene synthesis and restriction fragment exchange. The amino acid sequence of human MUC1 with a 5× tandem repeat VNTR region was submitted to GeneArt for gene optimization and synthesis. The gene encoding the polypeptide was optimized for expression, synthesized, and cloned. The MUC-1 open reading frame was excised from the GeneArt vector by digestion with NheI and BgIII and inserted into similarly digested plasmid pPJV7563. The open reading frame (ORF) nucleotide sequence of Plasmid 1027 is set forth in SEQ ID NO:7. The amino acid sequence encoded by Plasmid 1027 is set for in SEQ ID NO:8.

[0266] Plasmid 1103 (cMSLN).

[0267] Plasmid 1103 was constructed using the techniques of PCR and restriction fragment exchange. First, the gene encoding the mesothelin precursor amino acids 37-597 was amplified by PCR from plasmid 1084 with primers MSLN34 and MSLN598, resulting in the addition of NheI and BgIII restriction sites at the 5′ and 3′ ends of the amplicon, respectively. The amplicon was digested with NheI and Bgl II and inserted into similarly digested plasmid pPJV7563. The open reading frame nucleotide sequence of Plasmid 1103 is set forth in SEQ ID NO:5. The amino acid sequence encoded by Plasmid 1103 is set for in SEQ ID NO:6.

[0268] Plasmid 1112 (TERT240).

[0269] Plasmid 1112 was constructed using the techniques of PCR and Seamless cloning. First, the gene encoding TERT amino acids 241-1132 was amplified by PCR from plasmid 1065 with primers f pmed TERT 241G and r TERT co# pMed. The amplicon was cloned into the Nhe I/Bgl II sites of pPJV7563 by Seamless cloning. The open reading frame nucleotide sequence of Plasmid 1112 is set forth in SEQ ID NO:9. The amino acid sequence encoded by Plasmid 1112 is set for in SEQ ID NO:10.

[0270] Plasmid 1197 (cMUC1).

[0271] Plasmid 1197 was constructed using the techniques of PCR and Seamless cloning. First, the gene encoding MUC1 amino acids 22-225, 946-1255 was amplified by PCR from plasmid 1027 with primers ID1197F and ID1197R. The amplicon was cloned into the Nhe I/Bgl II sites of pPJV7563 by Seamless cloning. The open reading frame nucleotide sequence of Plasmid 1197 is set forth in SEQ ID NO:15. The amino acid sequence encoded by Plasmid 1197 is set for in SEQ ID NO:16.

[0272] Plasmid 1326 (TERT343).

[0273] Plasmid 1326 was constructed using the techniques of PCR and Seamless cloning. First, the gene encoding TERT amino acids 344-1132 was amplified by PCR from plasmid 1112 with primers TertA343-F and Tert-R. The amplicon was cloned into the Nhe I/Bgl II sites of pPJV7563 by Seamless cloning. The open reading frame nucleotide sequence of Plasmid 1326 is set forth in SEQ ID NO:13. The amino acid sequence encoded by Plasmid 1326 is set for in SEQ ID NO:14.

[0274] Plasmid 1330 (TERT541).

[0275] Plasmid 1330 was constructed using the techniques of PCR and Seamless cloning. First, the gene encoding TERT amino acids 542-1132 was amplified by PCR from plasmid 1112 with primers TertΔ541-F and Tert-R. The amplicon was cloned into the Nhe I/Bgl II sites of pPJV7563 by Seamless cloning. The open reading frame nucleotide sequence of Plasmid 1330 is set forth in SEQ ID NO:11. The amino acid sequence encoded by Plasmid 1330 is set for in SEQ ID NO:12.

[0276] 1B. Dual-Antigen Constructs

[0277] Plasmid 1158 (cMSLN-PT2A-Muc1). Plasmid 1158 was constructed using the techniques of PCR and Seamless cloning. First, the gene encoding the mesothelin precursor amino acids 37-597 was amplified by PCR from plasmid 1103 with primers f pmed Nhe cMSLN and r PTV2A Bamh cMSLN. The gene encoding human Mucin-1 amino acids 2-225, 946-1255 was amplified by PCR from plasmid 1027 with primers f1 PTV2A Muc, f2 PTV2A, and r pmed Bgl Muc. PCR resulted in the addition of overlapping PTV 2A sequences at the 3′ end of cMSLN and 5′ end of Mud. The amplicons were mixed together and cloned into the Nhe I/Bgl II sites of pPJV7563 by Seamless cloning. The open reading frame nucleotide sequence of Plasmid 1158 is set forth in SEQ ID NO:23. The amino acid sequence encoded by Plasmid 1158 is set for in SEQ ID NO:24.

[0278] Plasmid 1159 (Muc1-PT2A-cMSLN).

[0279] Plasmid 1159 was constructed using the techniques of PCR and Seamless cloning. First, the gene encoding the mesothelin precursor amino acids 37-597 was amplified by PCR from plasmid 1103 with primers f1 PTV2A cMSLN, f2 PTV2A, and r pmed Bgl cMSLN. The gene encoding human Mucin-1 amino acids 2-225, 946-1255 was amplified by PCR from plasmid 1027 with primers f pmed Nhe Muc and r PTV2A Bamh Muc. PCR resulted in the addition of overlapping PTV 2A sequences at the 5′ end of cMSLN and 3′ end of Mud. The amplicons were mixed together and cloned into the Nhe I/Bgl II sites of pPJV7563 by Seamless cloning. The open reading frame nucleotide sequence of Plasmid 1159 is set forth in SEQ ID NO:21. The amino acid sequence encoded by Plasmid 1159 is set for in SEQ ID NO:22.

[0280] Plasmid 1269 (Muc1-Ter240).

[0281] Plasmid 1269 was constructed using the techniques of PCR and Seamless cloning. First, the gene encoding the human telomerase amino acids 241-1132 was amplified by PCR from plasmid 1112 with primers f tg link Ter240 and r pmed Bgl Ter240. The gene encoding human Mucin-1 amino acids 2-225, 946-1255 was amplified by PCR from plasmid 1027 with primers f pmed Nhe Muc and r link muc. PCR resulted in the addition of an overlapping GGSGG linker at the 5′ end of Tert and 3′ end of Mud. The amplicons were mixed together and cloned into the Nhe I/Bgl II sites of pPJV7563 by Seamless cloning. The open reading frame nucleotide sequence of Plasmid 1269 is set forth in SEQ ID NO:25. The amino acid sequence encoded by Plasmid 1269 is set for in SEQ ID NO:26.

[0282] Plasmid 1270 (Muc1-ERB2A-Ter240).

[0283] Plasmid 1270 was constructed using the techniques of PCR and Seamless cloning. First, the gene encoding the human telomerase amino acids 241-1132 was amplified by PCR from plasmid 1112 with primers f2 ERBV2A, f1 ERBV2A Ter240, and r pmed Bgl Ter240. The gene encoding human Mucin-1 amino acids 2-225, 946-1255 was amplified by PCR from plasmid 1027 with primers f pmed Nhe Muc and r ERB2A Bamh Muc. PCR resulted in the addition of overlapping ERBV 2A sequences at the 5′ end of Tert and 3′ end of Muc1. The amplicons were mixed together and cloned into the Nhe I/Bgl II sites of pPJV7563 by Seamless cloning. The open reading frame nucleotide sequence of Plasmid 1270 is set forth in SEQ ID NO:27. The amino acid sequence encoded by Plasmid 1270 is set for in SEQ ID NO:28.

[0284] Plasmid 1271 (Ter240-ERB2A-Muc1).

[0285] Plasmid 1271 was constructed using the techniques of PCR and Seamless cloning. First, the gene encoding the human telomerase amino acids 241-1132 was amplified by PCR from plasmid 1112 with primers f pmed Nhe Ter240 and r ERB2A Bamh Ter240. The gene encoding human Mucin-1 amino acids 2-225, 946-1255 was amplified by PCR from plasmid 1027 with primers f2 ERBV2A, f1 ERBV2A Muc, and r pmed Bgl Muc. PCR resulted in the addition of overlapping ERBV 2A sequences at the 3′ end of Tert and 5′ end of Muc1. The amplicons were mixed together and cloned into the Nhe I/Bgl II sites of pPJV7563 by Seamless cloning. The open reading frame nucleotide sequence of Plasmid 1271 is set forth in SEQ ID NO:29. The amino acid sequence encoded by Plasmid 1271 is set for in SEQ ID NO:30.

[0286] Plasmid 1272 (Ter240-T2A-cMSLN).

[0287] Plasmid 1272 was constructed using the techniques of PCR and Seamless cloning. First, the gene encoding the human telomerase amino acids 241-1132 was amplified by PCR from plasmid 1112 with primers f pmed Nhe Ter240 and r T2A Tert240. The gene encoding the mesothelin precursor amino acids 37-597 was amplified by PCR from plasmid 1103 with primers f2 T2A, f1 T2A cMSLN, and r pmed Bgl cMSLN. PCR resulted in the addition of overlapping TAV 2A sequences at the 3′ end of Tert and 5′ end of cMSLN. The amplicons were mixed together and cloned into the Nhe I/Bgl II sites of pPJV7563 by Seamless cloning. The open reading frame nucleotide sequence of Plasmid 1272 is set forth in SEQ ID NO:35. The amino acid sequence encoded by Plasmid 1272 is set for in SEQ ID NO:36.

[0288] Plasmid 1273 (Tert240-cMSLN).

[0289] Plasmid 1273 was constructed using the techniques of PCR and Seamless cloning. First, the gene encoding the human telomerase amino acids 241-1132 was amplified by PCR from plasmid 1112 with primers f pmed Nhe Ter240 and r link Tert240. The gene encoding the mesothelin precursor amino acids 37-597 was amplified by PCR from plasmid 1103 with primers f tert ink cMSLN and r pmed Bgl cMSLN. PCR resulted in the addition of an overlapping GGSGG linker at the 3′ end of Tert and 5′ end of cMSLN. The amplicons were mixed together and cloned into the Nhe I/Bgl II sites of pPJV7563 by Seamless cloning. The open reading frame nucleotide sequence of Plasmid 1273 is set forth in SEQ ID NO:37. The amino acid sequence encoded by Plasmid 1273 is set for in SEQ ID NO:38.

[0290] Plasmid 1274 (cMSLN-T2A-Tert240).

[0291] Plasmid 1274 was constructed using the techniques of PCR and Seamless cloning. First, the gene encoding the human telomerase amino acids 241-1132 was amplified by PCR from plasmid 1112 with primers f2 T2A, f1 T2A Tert240 and r pmed Bgl Ter240. The gene encoding the mesothelin precursor amino acids 37-597 was amplified by PCR from plasmid 1103 with primers f pmed Nhe cMSLN and r T2A Bamh cMSLN. PCR resulted in the addition of overlapping TAV 2A sequences at the 5′ end of Tert and 3′ end of cMSLN. The amplicons were mixed together and cloned into the Nhe I/Bgl II sites of pPJV7563 by Seamless cloning. The open reading frame nucleotide sequence of Plasmid 1274 is set forth in SEQ ID NO:39. The amino acid sequence encoded by Plasmid 1274 is set for in SEQ ID NO:40.

[0292] Plasmid 1275 (cMSLN-Tert240).

[0293] Plasmid 1275 was constructed using the techniques of PCR and Seamless cloning. First, the gene encoding human telomerase amino acids 241-1132 was amplified by PCR from plasmid 1112 with primers f tg link Ter240 and r pmed Bgl Ter240. The gene encoding the mesothelin precursor amino acids 37-597 was amplified by PCR from plasmid 1103 with primers f pmed Nhe cMSLN and r link cMSLN. PCR resulted in the addition of an overlapping GGSGG linker at the 5′ end of Tert and 3′ end of cMSLN. The amplicons were mixed together and cloned into the Nhe I/Bgl II sites of pPJV7563 by Seamless cloning. The open reading frame nucleotide sequence of Plasmid 1275 is set forth in SEQ ID NO:41. The amino acid sequence encoded by Plasmid 1275 is set for in SEQ ID NO:42.

[0294] Plasmid 1286 (cMuc1-ERB2A-Tert240).

[0295] Plasmid 1286 was constructed using the techniques of PCR and Seamless cloning. First, the gene encoding the human telomerase amino acids 241-1132 was amplified by PCR from plasmid 1112 with primers f2 ERBV2A, f1 ERBV2A Ter240, and r pmed Bgl Ter240. The gene encoding human Mucin-1 amino acids 22-225, 946-1255 was amplified by PCR from plasmid 1197 with primers f pmed Nhe cytMuc and r ERB2A Bamh Muc. PCR resulted in the addition of overlapping ERBV 2A sequences at the 5′ end of Tert and 3′ end of Muc1. The amplicons were mixed together and cloned into the Nhe I/Bgl II sites of pPJV7563 by Seamless cloning. The open reading frame nucleotide sequence of Plasmid 1286 is set forth in SEQ ID NO:31. The amino acid sequence encoded by Plasmid 1286 is set for in SEQ ID NO:32.

[0296] Plasmid 1287 (Tert240-ERB2A-cMuc1).

[0297] Plasmid 1287 was constructed using the techniques of PCR and Seamless cloning. First, the gene encoding the human telomerase amino acids 241-1132 was amplified by PCR from plasmid 1112 with primers f pmed Nhe Ter240 and r ERB2A Bamh Ter240. The gene encoding human Mucin-1 amino acids 22-225, 946-1255 was amplified by PCR from plasmid 1197 with primers f2 ERBV2A, f1 ERBV2A cMuc, and r pmed Bgl Muc. PCR resulted in the addition of overlapping ERBV 2A sequences at the 3′ end of Tert and 5′ end of Muc1. The amplicons were mixed together and cloned into the Nhe I/Bgl II sites of pPJV7563 by Seamless cloning. The open reading frame nucleotide sequence of Plasmid 1287 is set forth in SEQ ID NO:33. The amino acid sequence encoded by Plasmid 1287 is set for in SEQ ID NO: 34.

[0298] Plasmid 1313 (Muc1-EMC2A-cMSLN).

[0299] Plasmid 1313 was constructed using the techniques of PCR and Seamless cloning. First, the gene encoding the mesothelin precursor amino acids 37-597 was amplified by PCR from plasmid 1103 with primers EMCV_cMSLN_F-33, EMCV2A_F-34 and pMED_cMSLN_R-37. The gene encoding human Mucin-1 amino acids 2-225, 946-1255 was amplified by PCR from plasmid 1027 with primers pMED_MUC1_F-31, EMCV2A_R-36, and EMCV_Muc1_R-35. PCR resulted in the addition of overlapping EMCV 2A sequences at the 5′ end of cMSLN and 3′ end of Mud. The amplicons were mixed together and cloned into the Nhe I/Bgl II sites of pPJV7563 by Seamless cloning. The open reading frame nucleotide sequence of Plasmid 1313 is set forth in SEQ ID NO:19. The amino acid sequence encoded by Plasmid 1313 is set for in SEQ ID NO:20.

[0300] Plasmid 1316 (cMSLN-EMC2A-Muc1).

[0301] Plasmid 1316 was constructed using the techniques of PCR and Seamless cloning. First, the gene encoding the human mesothelin precursor amino acids 37-597 was amplified by PCR from plasmid 1103 with primers f pmed Nhe cMSLN and r EM2A Bamh cMSLN. The gene encoding human Mucin-1 amino acids 2-225, 946-1255 was amplified by PCR from plasmid 1027 with primers f1 EM2A Muc, f2 EMCV2A, and r pmed Bgl Muc. PCR resulted in the addition of overlapping EMCV 2A sequences at the 3′ end of cMSLN and 5′ end of Muc1. The amplicons were mixed together and cloned into the Nhe I/Bgl II sites of pPJV7563 by Seamless cloning. The open reading frame nucleotide sequence of Plasmid 1316 is set forth in SEQ ID NO:17. The amino acid sequence encoded by Plasmid 1316 is set for in SEQ ID NO:18.

[0302] 1C. Triple-Antigen Constructs

[0303] Plasmid 1317 (Muc1-EMC2A-cMSLN-T2A-Tert240).

[0304] Plasmid 1317 was constructed using the techniques of PCR and Seamless cloning. First, the genes encoding human Mucin-1 amino acids 2-225, 946-1255, an EMCV 2A peptide, and the amino terminal half of the mesothelin precursor were amplified by PCR from plasmid 1313 with primers f pmed Nhe Muc and r MSLN 1051-1033. The genes encoding the carboxy terminal half of the mesothelin precursor, a TAV 2A peptide, and human telomerase amino acids 241-1132 were amplified by PCR from plasmid 1274 with primers f MSLN 1028-1051 and r pmed Bgl Ter240. The partially overlapping amplicons were digested with Dpn I, mixed together, and cloned into the Nhe I/Bgl II sites of pPJV7563 by Seamless cloning. The open reading frame nucleotide sequence of Plasmid 1317 is set forth in SEQ ID NO:43. The amino acid sequence encoded by Plasmid 1317 is set for in SEQ ID NO:44.

[0305] Plasmid 1318 (Muc1-ERB2A-Tert240-T2A-cMSLN).

[0306] Plasmid 1318 was constructed using the techniques of PCR and Seamless cloning. First, the genes encoding human Mucin-1 amino acids 2-225, 946-1255, an ERBV 2A peptide, and the amino terminal half of human telomerase were amplified by PCR from plasmid 1270 with primers f pmed Nhe Muc and r tert 1602-1579. The genes encoding the carboxy terminal half of telomerase, a TAV 2A peptide, and human mesothelin precursor amino acids 37-597 were amplified by PCR from plasmid 1272 with primers f tert 1584-1607 and r pmed Bgl cMSLN. The partially overlapping amplicons were digested with Dpn I, mixed together, and cloned into the Nhe I/Bgl II sites of pPJV7563 by Seamless cloning. The open reading frame nucleotide sequence of Plasmid 1318 is set forth in SEQ ID NO:45. The amino acid sequence encoded by Plasmid 1318 is set for in SEQ ID NO:46.

[0307] Plasmid 1319 (cMSLN-EMC2A-Muc1-ERB2A-Tert240).

[0308] Plasmid 1319 was constructed using the techniques of PCR and Seamless cloning. First, the genes encoding human mesothelin precursor amino acids 37-597, an EMCV 2A peptide, and the amino terminal half of human Mucin-1 were amplified by PCR from plasmid 1316 with primers f pmed Nhe cMSLN and r muc 986-963. The genes encoding the carboxy terminal half of Mucin-1, an ERBV 2A peptide, and human telomerase amino acids 241-1132 were amplified by PCR from plasmid 1270 with primers f Muc 960-983 and r pmed Bgl Ter240. The partially overlapping amplicons were digested with Dpn I, mixed together, and cloned into the Nhe I/Bgl II sites of pPJV7563 by Seamless cloning. The open reading frame nucleotide sequence of Plasmid 1319 is set forth in SEQ ID NO:47. The amino acid sequence encoded by Plasmid 1319 is set for in SEQ ID NO:48.

[0309] Plasmid 1320 (cMSLN-T2A-Tert240-ERB2A-Muc1).

[0310] Plasmid 1320 was constructed using the techniques of PCR and Seamless cloning. First, the genes encoding human mesothelin precursor amino acids 37-597, a TAV 2A peptide, and the amino terminal half of human telomerase were amplified by PCR from plasmid 1274 with primers f pmed Nhe cMSLN and r tert 1602-1579. The genes encoding the carboxy terminal half of telomerase, an ERBV 2A peptide, and human Mucin-1 amino acids 2-225, 946-1255 were amplified by PCR from plasmid 1271 with primers f tert 1584-1607 and r pmed Bgl Muc. The partially overlapping amplicons were digested with Dpn I, mixed together, and cloned into the Nhe I/Bgl II sites of pPJV7563 by Seamless cloning. The open reading frame nucleotide sequence of Plasmid 1320 is set forth in SEQ ID NO:49. The amino acid sequence encoded by Plasmid 1320 is set for in SEQ ID NO:50.

[0311] Plasmid 1321 (Tert240-T2A-cMSLN-EMC2A-Muc1).

[0312] Plasmid 1321 was constructed using the techniques of PCR and Seamless cloning. First, the gene encoding the amino terminal half of human telomerase was amplified by PCR from plasmid 1112 with primers f pmed Nhe Ter240 and r tert 1602-1579. The genes encoding the carboxy terminal half of telomerase, a TAV 2A peptide, and the amino terminal half of human mesothelin precursor were amplified by PCR from plasmid 1272 with primers f tert 1584-1607 and r MSLN 1051-1033. The genes encoding the carboxy terminal half of human mesothelin precursor, an EMCV 2A peptide, and human Mucin-1 amino acids 2-225, 946-1255 were amplified by PCR from plasmid 1316 with primers f MSLN 1028-1051 and r pmed Bgl Muc. The three partially overlapping amplicons were mixed together and cloned into the Nhe I/Bgl II sites of pPJV7563 by Seamless cloning. The open reading frame nucleotide sequence of Plasmid 1321 is set forth in SEQ ID NO:51. The amino acid sequence encoded by Plasmid 1321 is set for in SEQ ID NO:52.

[0313] Plasmid 1322 (Tert240-ERB2A-Muc1-EMC2A-cMSLN).

[0314] Plasmid 1322 was constructed using the techniques of PCR and Seamless cloning. First, the genes encoding human telomerase amino acids 241-1132, an ERBV 2A peptide, and the amino terminal half of human Mucin-1 were amplified by PCR from plasmid 1271 with primers f pmed Nhe Ter240 and r muc 986-963. The genes encoding the carboxy terminal half of Mucin-1, an EMCV 2A peptide, and human mesothelin precursor amino acids 37-597 were amplified by PCR from plasmid 1313 with primers f Muc 960-983 and r pmed Bgl cMSLN. The partially overlapping amplicons were digested with Dpn I, mixed together, and cloned into the Nhe I/Bgl II sites of pPJV7563 by Seamless cloning. The open reading frame nucleotide sequence of Plasmid 1322 is set forth in SEQ ID NO:53. The amino acid sequence encoded by Plasmid 1322 is set for in SEQ ID NO:54.

[0315] Plasmid 1351 (Muc1-EMC2A-cMSLN-T2A-Tert541).

[0316] Plasmid 1351 was constructed using the techniques of PCR and Seamless cloning. First, the genes encoding human Mucin-1 amino acids 2-225, 946-1255, an EMCV 2A peptide, and the human mesothelin precursor were amplified by PCR from plasmid 1313 with primers f pmed Nhe Muc and r T2A Bamh cMSLN. The genes encoding a TAV 2A peptide and human telomerase amino acids 541-1132 were amplified by PCR from plasmid 1330 with primers f1 T2A Tert d541, f2 T2A, and r pmed Bgl Ter240. The partially overlapping amplicons were digested with Dpn I, mixed together, and cloned into the Nhe I/Bgl II sites of pPJV7563 by Seamless cloning. The open reading frame nucleotide sequence of Plasmid 1351 is set forth in SEQ ID NO:55. The amino acid sequence encoded by Plasmid 1351 is set for in SEQ ID NO:56.

[0317] Plasmid 1352 (cMSLN-EMC2A-Muc1-ERB2A-Tert541).

[0318] Plasmid 1352 was constructed using the techniques of PCR and Seamless cloning. First, the genes encoding human mesothelin precursor amino acids 37-597, an EMCV 2A peptide, and human Mucin-1 were amplified by PCR from plasmid 1316 with primers f pmed Nhe cMSLN and r ERB2A Bamh Muc. The genes encoding an ERBV 2A peptide and human telomerase amino acids 541-1132 were amplified by PCR from plasmid 1330 with primers f1 ERBV2A Tert d541, f2 ERBV2A, and r pmed Bgl Ter240. The partially overlapping amplicons were digested with Dpn I, mixed together, and cloned into the Nhe I/Bgl II sites of pPJV7563 by Seamless cloning. The open reading frame nucleotide sequence of Plasmid 1352 is set forth in SEQ ID NO:57. The amino acid sequence encoded by Plasmid 1352 is set for in SEQ ID NO:58.

[0319] Plasmid 1353 (cMSLN-T2A-Tert541-ERB2A-Muc1).

[0320] Plasmid 1353 was constructed using the techniques of PCR and Seamless cloning. First, the gene encoding human mesothelin precursor amino acids 37-597 was amplified by PCR from plasmid 1103 with primers f pmed Nhe cMSLN, r2 T2A, and r T2A Bamh cMSLN. The genes encoding a TAV 2A peptide, human telomerase amino acids 541-1132, an ERBV 2A peptide, and human Mucin-1 amino acids 2-225, 946-1255 were amplified by PCR from plasmid 1271 with primers f1 T2A Tert d541 and r pmed Bgl Muc. The partially overlapping amplicons were digested with Dpn I, mixed together, and cloned into the Nhe I/Bgl II sites of pPJV7563 by Seamless cloning. The open reading frame nucleotide sequence of Plasmid 1353 is set forth in SEQ ID NO:59. The amino acid sequence encoded by Plasmid 1353 is set for in SEQ ID NO:60.

[0321] Plasmid 1354 (Muc1-EMC2A-cMSLN-T2A-Tert342).

[0322] Plasmid 1354 was constructed using the techniques of PCR and Seamless cloning. First, the genes encoding human Mucin-1 amino acids 2-225, 946-1255, an EMCV 2A peptide, and the human mesothelin precursor were amplified by PCR from plasmid 1313 with primers f pmed Nhe Muc and r T2A Bamh cMSLN. The genes encoding a TAV 2A peptide and human telomerase amino acids 342-1132 were amplified by PCR from plasmid 1326 with primers f1 T2A Tert d342, f2 T2A, and r pmed Bgl Ter240. The partially overlapping amplicons were digested with Dpn I, mixed together, and cloned into the Nhe I/Bgl II sites of pPJV7563 by Seamless cloning. The open reading frame nucleotide sequence of Plasmid 1354 is set forth in SEQ ID NO:61. The amino acid sequence encoded by Plasmid 1354 is set for in SEQ ID NO:62.

[0323] Plasmid 1355 (cMSLN-EMC2A-Muc1-ERB2A-Tert342).

[0324] Plasmid 1355 was constructed using the techniques of PCR and Seamless cloning. First, the genes encoding human mesothelin precursor amino acids 37-597, an EMCV 2A peptide, and human Mucin-1 were amplified by PCR from plasmid 1316 with primers f pmed Nhe cMSLN and r ERB2A Bamh Muc. The genes encoding an ERBV 2A peptide, and human telomerase amino acids 342-1132 were amplified by PCR from plasmid 1326 with primers f1 ERBV2A Ter d342, f2 ERBV2A, and r pmed Bgl Ter240. The partially overlapping amplicons were digested with Dpn I, mixed together, and cloned into the Nhe I/Bgl II sites of pPJV7563 by Seamless cloning. The open reading frame nucleotide sequence of Plasmid 1355 is set forth in SEQ ID NO:63. The amino acid sequence encoded by Plasmid 1355 is set for in SEQ ID NO:64.

[0325] Plasmid 1356 (cMSLN-T2A-Tert342-ERB2A-Muc1).

[0326] Plasmid 1356 was constructed using the techniques of PCR and Seamless cloning. First, the gene encoding human mesothelin precursor amino acids 37-597 was amplified by PCR from plasmid 1103 with primers f pmed Nhe cMSLN, r2 T2A, and r T2A Bamh cMSLN. The genes encoding a TAV 2A peptide, human telomerase amino acids 342-1132, an ERBV 2A peptide, and human Mucin-1 amino acids 2-225, 946-1255 were amplified by PCR from plasmid 1271 with primers f1 T2A Tert d342 and r pmed Bgl Muc. The partially overlapping amplicons were digested with Dpn I, mixed together, and cloned into the Nhe I/Bgl II sites of pPJV7563 by Seamless cloning. The resulting clone #3 contained an unintended single base mutation. To correct the mutation, PCR and Seamless cloning were repeated using clone #3 as the template. The genes encoding human mesothelin precursor amino acids 37-597, a TAV 2A peptide, and the amino terminal half of human telomerase were amplified by PCR from clone #3 with primers f pmed Nhe cMSLN and r tert 1602-1579. The genes encoding the carboxy terminal half of telomerase, an ERBV 2A peptide, and human Mucin-1 amino acids 2-225, 946-1255 were amplified by PCR from clone #3 with primers f tert 1584-1607 and r pmed Bgl Muc. The partially overlapping amplicons were digested with Dpn I, mixed together, and cloned into the Nhe I/Bgl II sites of pPJV7563 by Seamless cloning. The open reading frame nucleotide sequence of Plasmid 1356 is set forth in SEQ ID NO:65. The amino acid sequence encoded by Plasmid 1356 is set for in SEQ ID NO:66.

[0327] 1D. Vector Construction

[0328] Vectors for expressing single or multi-antigen constructs were constructed from chimpanzee adenovirus Ad68 genomic sequences. Three versions of the AdC68 backbone without transgenes (called “empty vectors”) were designed in silico. The vectors differed only in the extent of the E1 and E3 deletions that were engineered into the viruses to render them replication incompetent and create space for transgene insertion. Vectors AdC68W and AdC68X were described in international patent application WO2015/063647A1. Vector AdC68Y, carrying deletions of bases 456-3256 and 27476-31831, was engineered to have improved growth properties over AdC68X and a greater transgene carrying capacity than AdC68W. All three empty vectors were biochemically synthesized in a multi-stage process utilizing in vitro oligo synthesis and subsequent recombination-mediated intermediate assembly in Escherichia coli (E. coli) and yeast. Open reading frames (ORF) encoding the various immunogenic TAA polypeptides were amplified by PCR from the plasmids described in the Examples. Open reading frames were then inserted into the empty vector bacmids. Recombinant viral genomes were released from the bacmids by digestion with Pacl and the linearized nucleic acids were transfected into an E1 complimenting adherent HEK293 cell line. Upon visible cytopathic effects and adenovirus foci formation, cultures were harvested by multiple rounds of freezing/thawing to release virus from the cells. Viruses were amplified and purified by standard techniques.

### Example 2. Immunogenicity of Immunogenic Muc1 Single-Antigen Constructs

[0329] Study in HLA-A2/DR1 Mice

[0330] Study Design.

[0331] Twelve mixed gender HLA-A2/DR1 mice were primed on day 0 and boosted on day 14 with DNA construct Plasmid 1027 (which encodes the membrane-bound immunogenic MUC1 polypeptide of SEQ ID NO:8) or Plasmid 1197 (which encodes the cytosolic immunogenicMUC1 polypeptide of SEQ ID NO:16) using the PMED method. On day 21, mice were sacrificed and splenocytes assessed for MUC1-specific cellular immunogenicity in an interferon-gamma (IFN-γ) ELISpot and intracellular cytokine staining (ICS) assay.

[0332] Particle Mediated Epidermal Delivery (PMED).

[0333] PMED is a needle-free method of administering DNAs to a subject. The PMED system involves the precipitation of DNA onto microscopic gold particles that are then propelled by helium gas into the epidermis. The ND10, a single use device, uses pressurized helium from an internal cylinder to deliver gold particles and the X15, a repeater delivery device, uses an external helium tank which is connected to the X15 via high pressure hose to deliver the gold particles. Both of these devices were used in studies to deliver the MUC1 DNA plasmids. The gold particle was usually 1-3 μm in diameter and the particles were formulated to contain 2 μg of antigen DNA plasmids per 1 mg of gold particles. (Sharpe, M. et al.: P. Protection of mice from H5N1 influenza challenge by prophylactic DNA vaccination using particle mediated epidermal delivery. Vaccine, 2007, 25(34): 6392-98: Roberts L K, et al.: Clinical safety and efficacy of a powdered Hepatitis B nucleic acid vaccine delivered to the epidermis by a commercial prototype device. Vaccine, 2005; 23(40):4867-78).

[0334] IFN-γ ELISpot Assay.

[0335] Splenocytes from individual animals were co-incubated in triplicate with individual Ag-specific peptides (each peptide at 2-10 ug/ml, 2.5-5e5 cells per well) or pools of 15mer Ag-specific peptides (overlapping by 11 amino acids, covering the entire Ag-specific amino acid sequence; each peptide at 2-5 ug/ml, 1.25-5e5 cells per well) in IFN-γ ELISPOT plates (see also Peptide Pools Table (Table 18), and Tables 15-17). The plates were incubated for −16 hours at 37° C., 5% CO₂, then washed and developed, as per manufacturer's instruction. The number of IFN-γ spot forming cells (SFC) was counted with a CTL reader. The average of the triplicates was calculated and the response of the negative control wells, which contained no peptides, subtracted. The SFC counts were then normalized to describe the response per 1e6 splenocytes. The antigen-specific responses in the tables represent the sum of the responses to the Ag-specific peptides or peptide pools.

[0336] ICS Assay.

[0337] Splenocytes from individual animals were co-incubated with H-2b-, HLA-A2-, or HLA-A24-restricted Ag-specific peptides (each peptide at 5-10 ug/ml, 1-2e6 splenocytes per well) or pools of 15mer Ag-specific peptides (overlapping by 11 amino acids, covering the entire Ag-specific amino acid sequence; each peptide at 2-5 ug/ml, 1-2e6 splenocytes per well) in U-bottom 96-well-plate tissue culture plates (see also Peptide Pools Table (Table 18) and Tables 15-17). The plates were incubated −16 hours at 37° C., 5% CO₂. The cells were then stained to detect intracellular IFN-γ expression from CD8⁺ T cells and fixed. Cells were acquired on a flow cytometer. The data was presented per animal as frequency of peptide(s) Ag- or peptide pool Ag-specific IFN-γ⁺ CD8⁺ T cells after subtraction of the responses obtained in the negative control wells, which contained no peptide.

[0338] Sandwich ELISA Assay.

[0339] The standard sandwich ELISA assay was done using the Tecan Evo, Biomek Fx^{P}, and BioTek 405 Select TS automation instruments. The 384 well microplates (flat-well, high binding) were coated at 25 μl/well with 1.0 μg/mL human MUC1 or human MSLN protein (antigen) in 1×PBS, and incubated overnight at 4° C. The next morning, plates were blocked for one hour at RT with 5% FBS in PBS with 0.05% Tween 20 (PBS-T). Mouse sera was prepared at a 1/100 starting dilution in PBS-T in 96 U-bottom well plates. The Tecan Evo performed ½ log serial dilutions in PBS-T over 9 dilution increment points, followed by stamping of 25 μl/well of diluted serum from the 96 well plates to 384 well plates. The 384 well plates were incubated for 1 hour at RT on a shaker at 600 RPM, then, using the BioTek EL 405 Select TS plate washer, the plates were washed 4 times in PBS-T. Secondary mouse anti-IgG-HRP antibody was diluted to an appropriate dilution and stamped by Biomek Fx^{P} at 25 μl/well into 384 well plates, and incubated for 1 hour at RT on a shaker at 600 RPM, followed by 5 repeated washes. Using the Biomek Fx^{P}, plates were stamped at 25 μl/well of RT TMB substrate and incubated in the dark at RT for 30 minutes, followed by 25 μl/well stamping of 1N H₂SO₄ acid to stop the enzymatic reaction. Plates were read on the Molecular Devices, Spectramax 340PC/384 Plus at 450 nm wavelength. Data were reported as calculated titers at OD of 1.0 with a limit of detection of 99.0. The antigen-specific commercial monoclonal antibody was used in each plate as a positive control to track plate-to-plate variation performance; irrelevant vaccinated mouse serum was used as a negative control, and PBS-T only wells were used to monitor non-specific binding background. Titers in the tables represent antigen-specific IgG titers elicited from individual animals.

[0340] Results.

[0341] Table 1 shows ELISpot and ICS data from HLA-A2/DR1 splenocytes cultured with peptide pools derived from the MUC1 peptide library (see also tables 15 and 18) or MUC1 peptide aa516-530, respectively. Numbers in column 3 represent # IFN-γ spots/10⁶ splenocytes after restimulation with MUC1 peptide pools, and background subtraction. Numbers in column 4 represent the frequency of CD8⁺ T cells being IFN-γ⁺ after restimulation with MUC1 peptide aa516-530 and background subtraction. A positive response is defined as having SFC>100 and a frequency of IFN-γ⁺ CD8⁺ T cells>0.05%. As shown in Table 1, the immunogenic MUC1 polypeptides made with the full-length membrane-bound (Plasmid 1027) and cytosolic (Plasmid 1197) MUC1 constructs described in Example 1A above are capable of inducing MUC1-specific T cell responses including HLA-A2-restricted MUC1 peptide aa516-530-specific CD8⁺ T cell responses. The cytosolic MUC1 antigen format induced the highest magnitude of T cell responses. Importantly, T cell responses derived from cancer patients against the MUC1 peptide aa516-530 have been shown to correlate with anti-tumor efficacy in vitro (Jochems C et al., Cancer Immunol Immunother (2014) 63:161-174) demonstrating the importance of raising cellular responses against this specific epitope.

TABLE 1
T cell response induced by the single-antigen MUC1 DNA constructs
(Plasmid 1027 and Plasmid 1197) in HLA-A2/DR1 mice

| | | # IFN-γ spots/10⁶ | % CD8⁺ T cells being |
|---|---|---|---|
| Construct ID | Animal # | splenocytes | IFN-γ⁺ |
| Plasmid 1027 | 31 | 494 | 2.25 |
| | 32 | 277 | 1.44 |
| | 33 | 475 | 0.10 |
| | 34 | 1096 | 0.84 |
| | 35 | 282 | 1.45 |
| | 36 | 649 | 1.36 |
| Plasmid 1197 | 43 | 569 | 4.69 |
| | 44 | 1131 | 2.15 |
| | 45 | 122 | 2.81 |
| | 46 | 373 | 1.73 |
| | 47 | 503 | 1.80 |
| | 48 | 2114 | 5.52 |

[0342] Study in HLA-A24 Mice

[0343] Study Design.

[0344] Mixed gender HLA-A24 mice were primed on day 0 and boosted on days 14, 28 and 42 with DNA construct Plasmid 1027 by PMED administration. On day 21, mice were sacrificed and splenocytes assessed for MUC1-specific cellular immunogenicity (ELISpot).

[0345] Results.

[0346] Table 2 shows ELISpot data from HLA-A24 splenocytes cultured with peptide pools derived from the MUC1 peptide library (see also Peptide Pools Table (Table 18) and Table 15). Numbers in column 3 represent # IFN-γ spots/10⁶ splenocytes after restimulation with MUC1 peptide pools and background subtraction. The number in bold font indicates that at least 1 peptide pool tested was too numerous to count, therefore the true figure is at least the value stated. A positive response is defined as having SFC>100. As shown in Table 2, membrane-bound MUC1 construct is capable of inducing MUC1-specific cellular responses.

TABLE 2
T cell response induced by the single-antigen DNA construct Plasmid
1027 encoding human native full-length membrane-bound MUC1
antigen in HLA-A24 mice

| | | # IFN-γ spots/10⁶ |
|---|---|---|
| Construct ID | Animal # | splenocytes |
| Plasmid 1027 | 8 | 3341 |
| | 9 | 3181 |
| | 10 | 6207 |
| | 11 | 3112 |
| | 12 | 3346 |
| | 13 | 3699 |

[0347] Study in Monkeys

[0348] Study Design.

[0349] 14 Chinese cynomolgus macaques were primed with an AdC68W adenovirus vector encoding the cytosolic (Plasmid 1197) or full-length membrane-bound MUC1 antigen (Plasmid 1027) at 2e11 viral particles by bilateral intramuscular injection (1 mL total). 29 days later, animals were boosted with DNA encoding cytosolic or full-length membrane-bound MUC1 antigen delivered intramuscularly bilaterally via electroporation (2 mL total). Anti-CTLA-4 was administered subcutaneously on days 1 (32 mg) and 29 (50 mg). 14 days after the last immunization, animals were bled and PBMCs and sera isolated to assess MUC1-specific cellular (ELISpot, ICS) and humoral (ELISA) responses, respectively.

[0350] NHP-Specific Immune Assays.

[0351] EL/Spot Assay.

[0352] PBMCs from individual animals were co-incubated in duplicate with pools of 15mer Ag-specific peptides (overlapping by 11 amino acids, covering the entire Ag-specific amino acid sequence), each peptide at 2 ug/ml, 4e5 cells per well, in IFN-y ELISPOT plates (see also Peptide Pools Table (Table 18) and Tables 15-17). The plates were incubated for ˜16 hours at 37° C., 5% CO₂, then washed and developed, as per manufacturer's instruction. The number of IFN-γ spot forming cells (SFC) was counted with a CTL reader. The average of the duplicates was calculated and the response of the negative control wells, which contained no peptides, subtracted. The SFC counts were then normalized to describe the response per 1e6 PBMCs. The antigen-specific responses in the tables represent the sum of the responses to the Ag-specific peptide pools.

[0353] ICS Assay.

[0354] PBMCs from individual animals were co-incubated with pools of 15mer MUC1 peptides (overlapping by 11 amino acids, covering the entire native full-length MUC1 amino acid sequence; see Table 15), each peptide at 2 ug/mL, 1.5-2e6 PBMCs per well, in U-bottom 96-well-plate tissue culture plates. The plates were incubated for ˜16 hours at 37° C., 5% CO₂, and then stained to detect intracellular IFN-γ expression from CD8 T cells. After fixation, the cells were acquired on a flow cytometer. The results are presented per individual animal as number of MUC1, MSLN, or TERT-specific IFN-γ⁺ CD8⁺ T cells after subtraction of the responses obtained in the negative control wells, which contained no peptide, and normalized to 1 e6 CD8⁺ T cells.

[0355] Sandwich ELISA Assay.

[0356] The standard sandwich ELISA assay was done using the Tecan Evo, Biomek Fx^{P}, and BioTek 405 Select TS automation instruments. The 384 well microplates (flat-well, high binding) were coated at 25 μl/well with 1.0 μg/mL human MUC1 or human MSLN protein (antigen) in 1×PBS, and incubated overnight at 4° C. The next morning, plates were blocked for one hour at RT with 5% FBS in PBS with 0.05% Tween 20 (PBS-T). Sera from Chinese cynomolgus macaques was prepared at a 1/100 starting dilution in PBS-T in 96 U-bottom well plates. The Tecan Evo performed ½ log serial dilutions in PBS-T over 9 dilution increment points, followed by stamping of 25 μl/well of diluted serum from the 96 well plates to 384 well plates. The 384 well plates were incubated for 1 hour at RT on a shaker at 600 RPM, then, using the BioTek EL 405 Select TS plate washer, the plates were washed 4 times in PBS-T. Secondary rhesus anti-IgG-HRP antibody, which cross-reacts with cynomolgus IgG, was diluted to an appropriate dilution and stamped by Biomek Fx^{P} at 25 μl/well into 384 well plates, and incubated for 1 hour at RT on a shaker at 600 RPM, followed by 5 repeated washes. Using the Biomek Fx^{P}, plates were stamped at 25 μl/well of RT TMB substrate and incubated in the dark at RT for 30 minutes, followed by 25 μl/well stamping of 1N H₂SO₄ acid to stop the enzymatic reaction. Plates were read on the Molecular Devices, Spectramax 340PC/384 Plus at 450 nm wavelength. Data were reported as calculated titers at OD of 1.0 with a limit of detection of 99.0. The antigen-specific commercial monoclonal antibody was used in each plate as a positive control to track plate-to-plate variation performance; irrelevant vaccinated mouse serum was used as a negative control, and PBS-T only wells were used to monitor non-specific binding background. Titers in the tables represent antigen-specific IgG titers elicited from individual animals.

[0357] Results.

[0358] Table 3 shows the ELISpot and ICS data from Chinese cynomolgus macaques' PBMCs cultured with peptide pools derived from the MUC1 peptide library (see also Peptide Pools Table (Table 18) and Table 15), and the ELISA data from Chinese cynomolgus macaques' sera. Numbers in column 3 represent # IFN-γ spots/10⁶ PBMCs after restimulation with MUC1 peptide pools and background subtraction. Numbers in column 4 represent # IFN-γ⁺ CD8⁺ T cells/10⁶ CD8⁺ T cells after restimulation with MUC1 peptide pools and background subtraction. Numbers in column 5 represent the anti-MUC1 IgG titer (Optical Density (O.D)=1, Limit of Detection (L.O.D)=99.0). A positive response is defined as having SFC>50, IFN-γ⁺ CD8⁺ T cells/1e6 CD8⁺ T cells>50, and IgG titers>99. As shown in Table 3, the immunogenic MUC1 polypeptides made with the cytosolic (1197) and native full-length membrane-bound (1027) MUC1 constructs are capable of inducing MUC1-specific T and B cell responses. The native full-length membrane-bound MUC1 construct (1027) was shown to induce the overall best MUC1-specific cellular and humoral response.

TABLE 3
T and B cell responses induced by the single-antigen adenoviral AdC68W
and single-antigen DNA constructs (Plasmid 1197; Plasmid 1027)
in Chinese cynomolgus macaques

| | | # IFN-γ | # IFN-γ⁺ CD8⁺ T | |
|---|---|---|---|---|
| | | spots/10⁶ | cells/1e6 CD8⁺ T | |
| Construct ID # | Animal # | splenocytes | cells | IgG titer |
| Plasmid 1197 | 4001 | 0 | 0.0 | 8589.7 |
| | 4002 | 38 | 1549.0 | 4245.9 |
| | 4003 | 17 | 0.0 | 2631.9 |
| | 4501 | 165 | 4792.3 | 614.6 |
| | 4502 | 1703 | 47727.4 | 1882.8 |
| | 4503 | 0 | 802.8 | 4366.4 |
| | 4504 | 373 | 1857.0 | 4419.3 |
| Plasmid 1027 | 5001 | 797 | 813.5 | 5332.2 |
| | 5002 | 1013 | 312.9 | 16233.5 |
| | 5003 | 1011 | 9496.9 | 6885.8 |
| | 5004 | 175 | 170.2 | 48759.0 |
| | 5501 | 214 | 4803.3 | 13010.4 |
| | 5502 | 306 | 8367.6 | 13115.3 |
| | 5503 | 405 | 0.0 | 89423.0 |

### Example 3. Immunogenicity of MSLN Single-Antigen Constructs

[0359] Immune Response Study in Pasteur (HLA-A2/DR1) Mice Study design. Twelve female HLA-A2/DR1 mice were primed with an AdC68W adenovirus vector encoding the membrane-bound (Plasmid 1084) or cytosolic MSLN antigen (Plasmid 1103) at 1e10 viral particles by intramuscular injection (50 ul). 28 days later, animals were boosted with DNA single-antigen construct encoding an immunogenic MSLN polypeptide using PMED method as described in Example 2. The antigen-specific T cell response was measured seven days later in an IFN-γ ELISPOT and ICS assay.

[0360] Results.

[0361] Table 4 shows ELISpot and ICS data from HLA-A2/DR1 splenocytes cultured with peptide pools derived from the MSLN peptide library (see also Peptide Pools Table (Table 18) and Table 16) or MSLN peptides aa50-64, aa102-116, and aa542-556, respectively. Numbers in column 3 represent # IFN-γ spots/10⁶ splenocytes after restimulation with MSLN peptide pools and background subtraction. Numbers in column 4 represent the frequency of CD8⁺ T cells being IFN-γ⁺ after restimulation with MSLN peptides aa50-64, aa102-116 and aa542-556, and background subtraction. A positive response is defined as having SFC>100 and a frequency of IFN-γ⁺ CD8⁺ T cells>0.05%. As shown in Table 4, the immunogenic MSLN polypeptides made with the membrane-bound (1084) and cytosolic (1103) MSLN constructs described in Example 1A above are capable of inducing MSLN-specific T cell responses. The cytosolic MSLN antigen format induced the highest magnitude of MSLN-specific T cell responses.

TABLE 4
T cell response induced by the single-antigen adenoviral AdC68W
and single-antigen DNA constructs in HLA-A2/DR1 mice

| | | # IFN-γ spots/10⁶ | % CD8⁺ T cells |
|---|---|---|---|
| Construct ID | Animal # | splenocytes | being IFN-γ⁺ |
| Plasmid 1084 | 37 | 1744 | 1.07 |
| | 38 | 3488 | 3.13 |
| | 39 | 1905 | 0.19 |
| | 40 | 1649 | 2.47 |
| | 41 | 1900 | 0.09 |
| | 42 | 1108 | 1.87 |
| Plasmid 1103 | 49 | 4839 | 2.34 |
| | 50 | 4685 | 13.49 |
| | 51 | 2508 | 3.69 |
| | 52 | 1865 | 2.09 |
| | 53 | 708 | 0.38 |
| | 54 | 2525 | 4.41 |

[0362] Immune Response Study in HLA A24 Mice

[0363] Study designs. Twelve mixed-gender HLA-A24 mice were immunized with membrane-bound (1084) or cytosolic MSLN (1103) DNA constructs using the PMED method in a prime/boost/boost/boost regimen, two weeks apart between each vaccination. MSLN-specific T cell responses were measured 7 days after the last immunization in an IFN-γ ELISpot and ICS assay.

[0364] Results. Table 5 shows ELISpot and ICS data from HLA-A24 splenocytes cultured with peptide pools derived from the MSLN peptide library (see also Peptide Pools Table (Table 18) and Table 16) or MSLN peptides aa130-144 and aa230-244, respectively. Numbers in column 3 represent # IFN-γ spots/10⁶ splenocytes after restimulation with MSLN peptide pools and background subtraction. Numbers in column 4 represent the frequency of CD8⁺ T cells being IFN-γ⁺ after restimulation with MSLN peptides aa130-144 and aa230-244, and background subtraction. A positive response is defined as having SFC>100 and a frequency of IFN-γ⁺ CD8⁺ T cells>0.05%. As shown in Table 5, the immunogenic MSLN polypeptides made with the membrane-bound (1084) and cytosolic MSLN (1103) constructs are capable of inducing MSLN-specific T cell responses. The cytosolic MSLN antigen format induced the highest magnitude of MSLN-specific T cell responses.

TABLE 5
T cell response induced by the single-antigen DNA constructs
in HLA-A24 mice

| | | # IFN-γ | |
|---|---|---|---|
| | | spots/10⁶ | % CD8⁺ T cells |
| Construct ID | Animal # | splenocytes | being IFN-γ⁺ |
| Plasmid 1084 | 1 | 47 | Not determined |
| | 2 | 161 | Not determined |
| | 3 | 13 | Not determined |
| | 7 | 105 | Not determined |
| | 8 | 232 | Not determined |
| | 9 | 151 | Not determined |
| Plasmid 1103 | 13 | 2440 | 0.00 |
| | 14 | 2345 | 0.17 |
| | 15 | 1789 | 0.00 |
| | 19 | 3184 | 0.64 |
| | 21 | 5463 | 1.62 |
| | 22 | 2324 | 0.39 |

[0365] Immune Response Study in Monkeys

[0366] Study Design.

[0367] 14 Chinese cynomolgus macaques were primed with an AdC68W adenovirus vector encoding the membrane-bound (Plasmid 1084) or cytosolic MSLN antigen (Plasmid 1103) at 2e11 viral particles by bilateral intramuscular injection (1 mL total). 29 days later, animals were boosted with DNA encoding membrane-bound (1084) or cytosolic MSLN antigen (1103) delivered intramuscularly bilaterally via electroporation (2 mL total). Anti-CTLA-4 was administered subcutaneously on days 1 (32 mg) and 29 (50 mg). 14 days after the last immunization, animals were bled and PBMCs and serum isolated to assess MSLN-specific cellular (ELISpot, ICS) and humoral (ELISA) responses, respectively.

[0368] Results.

[0369] Table 6 shows the ELISpot and ICS data from Chinese cynomolgus macaques' PBMCs cultured with peptide pools derived from the MSLN peptide library (see also Peptide Pools Table (Table 18) and Table 16), and the ELISA data from Chinese cynomolgus macaques' sera. Numbers in column 3 represent # IFN-γ spots/10⁶ splenocytes after restimulation with MSLN peptide pools and background subtraction. Numbers in column 4 represent # IFN-γ⁺ CD8⁺ T cells/10⁶ CD8⁺ T cells after restimulation with MSLN peptide pools and background subtraction. Numbers in column 5 represent the anti-MSLN IgG titer (Optical Density (O.D)=1, Limit of Detection (L.O.D)=99.0). A positive response is defined as having SFC>50, IFN-γ⁺ CD8⁺ T cells/1e6 CD8⁺ T cells>50, and IgG titers>99. As shown in Table 6, the immunogenic MSLN polypeptides made with the membrane-bound (1084) and cytosolic (1103) MSLN constructs are capable of inducing MSLN-specific T and B cell responses. The cytoplasmic MSLN construct (Plasmid 1103) was shown to induce the strongest MSLN-specific cellular response; in contrast, the membrane-bound MSLN construct (Plasmid 1084) was shown to induce the strongest MSLN-specific humoral response.

TABLE 6
T and B cell responses induced by the single-antigen adenoviral
AdC68W and single-antigen DNA constructs in Chinese
cynomolgus macaques

| | | | # IFN-γ⁺ | |
|---|---|---|---|---|
| | | # IFN-γ | CD8⁺ T cells/ | |
| | | spots/10⁶ | 1e6 CD8⁺ T | |
| Construct ID # | Animal # | splenocytes | cells | IgG titer |
| Plasmid 1084 | 1001 | 390 | 181.4 | 40886.6 |
| | 1002 | 787 | 512.0 | 41476.1 |
| | 1003 | 2083 | 5642.6 | 11948.1 |
| | 1501 | 894 | 1083.7 | 41248.3 |
| | 1502 | 1789 | 6501.0 | 42668.3 |
| | 1503 | 2358 | 37238.3 | 42026.5 |
| | 1504 | 269 | 1340.9 | 43023.6 |
| Plasmid 1103 | 2001 | 2131 | 15318.5 | 1459.3 |
| | 2002 | 2818 | 7163.4 | 99.0 |
| | 2003 | 1115 | 2291.0 | 2393.2 |
| | 2004 | 948 | 3602.6 | 1948.0 |
| | 2501 | 2477 | 13741.4 | 1751.7 |
| | 2502 | 2082 | 9318.7 | 15412.5 |
| | 2503 | 831 | 1797.8 | 99.0 |

### Example 4. Immunogenicity of Tert Single-Antigen Constructs

[0370] Immune Responses Study in Pasteur Mice

[0371] Study Design.

[0372] Six mixed gender HLA-A2/DR1 mice were primed with an AdC68W adenovirus vector encoding the truncated (Δ240) cytosolic immunogenic TERT polypeptide (Plasmid 1112) at 1e10 viral particles by intramuscular injection (50 ul). 28 days later, animals were boosted intramuscularly with 50 ug DNA delivered bilaterally via electroporation (2×20 ul) encoding the truncated (Δ240) cytosolic TERT antigen (Plasmid 1112). The antigen-specific T cell response was measured seven days later in an IFN-γ ELISPOT and ICS assay.

[0373] Results.

[0374] Table 7 shows ELISpot and ICS data from HLA-A2/DR1 splenocytes cultured with peptide pools derived from the TERT peptide library (see also Peptide Pools Table (Table 18) and Table 17) or TERT peptide aa861-875, respectively. Numbers in column 3 represent # IFN-γ spots/10⁶ splenocytes after restimulation with TERT peptide pools and background subtraction. Numbers in column 4 represent the frequency of CD8⁺ T cells being IFN-γ⁺ after restimulation with TERT peptide aa861-875 and background subtraction. A positive response is defined as having SFC>100 and a frequency of IFN-γ⁺ CD8⁺ T cells>0.05%. As shown in Table 7, the immunogenic TERT polypeptide made with the truncated (Δ240) cytosolic TERT construct described in Example 1A above is capable of inducing HLA-A2-restricted TERT-specific CD8 T cell responses.

TABLE 7
T cell response induced by the single-antigen adenoviral AdC68W
and single-antigen DNA constructs (Plasmid 1112) encoding human
truncated (Δ240) cytosolic TERT antigen in HLA-A2/DR1 mice

| | | # IFN-γ | |
|---|---|---|---|
| | | spots/10⁶ | % CD8⁺ T cells |
| Construct ID | Animal # | splenocytes | being IFN-γ⁺ |
| Plasmid 1112 | 13 | 2851 | 32.79 |
| | 14 | 2691 | 13.60 |
| | 15 | 3697 | 7.87 |
| | 16 | 2984 | 21.30 |
| | 17 | 1832 | 26.40 |
| | 18 | 1385 | 3.16 |

[0375] Immune Responses Study in HLA A24 Mice

[0376] Study Designs.

[0377] Eight mixed gender HLA-A24 mice were primed with an AdC68W adenovirus vector encoding the truncated (4240) cytosolic TERT antigen (Plasmid 1112) at 1e10 viral particles total by bilateral intramuscular injection (50 ul into each tibialis anterior muscle). 14 days later, animals were boosted intramuscularly with 50 ug DNA delivered bilaterally via electroporation (2×20 ul) encoding the truncated (4240) cytosolic TERT antigen (Plasmid 1112). The antigen-specific T cell response was measured seven days later in an IFN-γ ELISPOT and ICS assay.

[0378] Results.

[0379] Table 8 shows IFN-γ ELISpot and ICS data from HLA-A24 splenocytes cultured with peptide pools derived from the TERT peptide library (see also Peptide Pools Table (Table 18) and Table 17) or TERT peptide aa841-855), respectively. Numbers in column 3 represent # IFN-γ spots/10⁶ splenocytes after restimulation with TERT peptide pools and background subtraction. Numbers in column 4 represent the frequency of CD8⁺ T cells being IFN-γ⁺ after restimulation with TERT peptides aa841-855, and background subtraction. The number in bold font indicates that at least 1 peptide pool tested was too numerous to count, therefore the true figure is at least the value stated. A positive response is defined as having SFC>100 and a frequency of IFN-γ⁺ CD8⁺ T cells>0.1%. As shown in Table 8, the immunogenic TERT polypeptide made with the truncated (Δ240) cytosolic TERT (1112) construct is capable of inducing HLA-A24-restricted TERT-specific CD8⁺ T cell responses.

TABLE 8
T cell response induced by the single-antigen adenoviral AdC68W
single-antigen DNA constructs (Plasmid 1112) encoding human
truncated (Δ240) cytosolic TERT antigen in HLA-A24 mice

| | | # IFN-γ | % CD8⁺ T |
|---|---|---|---|
| | | spots/10⁶ | cells being |
| Construct ID | Animal # | splenocytes | IFN-γ⁺ |
| Plasmid 1112 | 17 | 4233 | 41.5 |
| | 18 | 2643 | 3.34 |
| | 19 | 1741 | 31.5 |
| | 20 | 3407 | 3.05 |
| | 21 | 3213 | 0.0903 |
| | 22 | 596 | 0 |
| | 23 | 1875 | 13.8 |
| | 24 | 2011 | 19.8 |

[0380] Immune Responses Study in Monkeys

[0381] Study Design.

[0382] Eight Chinese cynomolgus macaques were primed with an AdC68W adenovirus vector encoding the truncated (4240) cytosolic TERT antigen (Plasmid 1112) at 2e11 viral particles by bilateral intramuscular injection (1 mL total). 30 and 64 days later, animals were boosted with DNA (Plasmid 1112) encoding truncated (Δ240) cytosolic TERT antigen delivered intramuscularly bilaterally via electroporation (2 mL total). Anti-CTLA-4 was administered subcutaneously on days 1 (32 mg), 31 (50 mg) and 65 (75 mg). 14 days after the last immunization, animals were bled and PBMCs isolated to assess TERT-specific cellular (ELISpot, ICS) responses.

[0383] Results.

[0384] Table 9 shows the ELISpot and ICS data from Chinese cynomolgus macaques' PBMCs cultured with peptide pools derived from the TERT peptide library (see also Peptide Pools Table (table 18) and Table 17). Numbers in column 3 represent # IFN-γ spots/10⁶ splenocytes after restimulation with TERT peptide pools and background subtraction. Numbers in column 4 represent # IFN-γ⁺ CD8⁺ T cells/10⁶ CD8⁺ T cells after restimulation with TERT peptide pools and background subtraction. A positive response is defined as having SFC>50 and IFN-γ⁺ CD8⁺ T cells/1e6 CD8⁺ T cells>50. As shown in Table 9, the immunogenic TERT polypeptide made with the truncated (Δ240) cytosolic (Plasmid 1112) TERT construct is capable of inducing TERT-specific T cell responses.

TABLE 9
T cell response induced by the TERT single-antigen adenoviral
AdC68W and TERT single-antigen DNA constructs in Chinese
cynomolgus macaques

| | | # IFN-γ | # IFN-γ⁺ CD8⁺ T |
|---|---|---|---|
| | | spots/10⁶ | cells/1e6 CD8⁺ T |
| Construct ID # | Animal # | splenocytes | cells |
| Plasmid 1112 | 1001 | 3487 | 29472.2 |
| | 1002 | 1130 | 4906.6 |
| | 1003 | 2077 | 2984.2 |
| | 1004 | 133 | 337.8 |
| | 1501 | 3157 | 5325.1 |
| | 1502 | 2037 | 653.2 |
| | 1503 | 2697 | 16953.4 |
| | 1504 | 1208 | 1178.9 |

### Example 5. Immunogenicity of Dual-Antigen Constructs

[0385] Immune Response Study in Monkeys

[0386] Study Design.

[0387] 24 Chinese cynomolgus macaques were primed with dual-antigen adenoviral AdC68W vectors encoding human native full-length membrane-bound MUC1 (MUC1) and human truncated (Δ240) cytosolic TERT (TERT_{Δ240}) antigens at 2e11 viral particles by bilateral intramuscular injection (1 mL total). 30 and 64 days later, animals were boosted with dual-antigen DNA constructs (Plasmids 1270, 1271, and 1269) encoding the same two antigens delivered intramuscularly bilaterally via electroporation (2 mL total). Anti-CTLA-4 was administered subcutaneously on days 1 (32 mg), 31 (50 mg) and 65 (75 mg). 14 days after the last immunization, animals were bled and PBMCs and serum isolated to assess MUC1- and TERT-specific cellular (ELISpot, ICS) and MUC1-specific humoral (ELISA) responses, respectively. In total, three different dual-antigen constructs, which co-expressed both antigens, were evaluated: a) MUC1-2A-TERT_{Δ240} (Plasmid 1270), an AdC68W vector and DNA plasmid encoding MUC1 and TERT linked by a 2A peptide; b) TERT_{Δ240}-2A-MUC1 (Plasmid 1271), an AdC68W vector and DNA plasmid encoding TERT and MUC1 linked by a 2A peptide; c) MUC1-TERT_{Δ240} (Plasmid 1269), an AdC68W vector and DNA plasmid encoding the MUC1-TERT fusion protein (see also Example 1B).

[0388] Results.

[0389] Table 10 shows the ELISpot and ICS data from Chinese cynomolgus macaques' PBMCs cultured with peptide pools derived from the MUC1 and TERT peptide libraries (see also Peptide Pools Table (Table 18) and Tables 15 and 17), and the ELISA data from Chinese cynomolgus macaques' sera. A positive response is defined as having SFC>50, IFN-γ⁺ CD8⁺ T cells/1e6 CD8⁺ T cells>50, and IgG titers>99. Numbers in columns 3 and 6 represent # IFN-γ spots/10⁶ splenocytes after restimulation with MUC1 and TERT peptide pools and background subtraction, respectively. Numbers in bold font indicates that at least 1 peptide pool tested was too numerous to count, therefore the true figure is at least the value stated. Numbers in columns 4 and 7 represent # IFN-γ⁺ CD8⁺ T cells/10⁶ CD8⁺ T cells after restimulation with MUC1 peptide pools and TERT peptide pools, respectively, and background subtraction. Numbers in column 5 represent the anti-MUC1 IgG titer (Optical Density (O.D)=1, Limit of Detection (L.O.D)=99.0). As shown in Table 10, the immunogenic MUC1 and TERT polypeptides made with the MUC1- and TERT-expressing dual-antigen constructs (Plasmids 1270, 1271, and 1269) are capable of inducing MUC1- and TERT-specific T cell responses, and MUC1-specific B cell responses. The dual-antigen construct 1269 encoding a MUC1-TERT fusion protein was shown to induce the strongest overall MUC1-specific cellular response; in contrast, dual-antigen construct Plasmid 1271 (TERT-2A-MUC1) was shown to induce the strongest overall TERT-specific cellular response. All three dual-antigen constructs were shown to induce a comparable MUC1-specific humoral response.

TABLE 10
T and B cell responses induced by the dual-antigen adenoviral AdC68W and
single-antigen DNA constructs (Plasmid 1270, 1271, and 1269) encoding an
immunogenic MUC1 and/or TERT polypeptide in Chinese cynomolgus macaques

| | | MUC1 | | | TERT | |
|---|---|---|---|---|---|---|
| | | | # IFN-γ⁺ | | | # IFN-γ⁺ |
| | | | CD8⁺ T | | | CD8⁺ T |
| | | # IFN-γ | cells/1e6 | | # IFN-γ | cells/1e6 |
| Construct | | spots/10⁶ | CD8⁺ T | | spots/10⁶ | CD8⁺ T |
| ID | Animal # | splenocytes | cells | IgG titer | splenocytes | cells |
| Plasmid | 5001 | 813 | 1024.4 | 10725.8 | 307 | 436.9 |
| 1270 | 5002 | 2778 | 14740.6 | 27090.7 | 1573 | 423.0 |
| | 5003 | 217 | 1198.7 | 19339.6 | 1687 | 40680.3 |
| | 5004 | 298 | Excluded | 3980.3 | 252 | 805.3 |
| | 5501 | 2287 | 6255.7 | 16278.9 | 692 | 0.0 |
| | 5502 | 760 | 0.0 | 6496.2 | 3010 | 13302.0 |
| | 5503 | 1315 | 199.8 | 6446.4 | 3702 | 7259.3 |
| | 5504 | 500 | 281.8 | 39868.0 | 2005 | 13727.8 |
| Plasmid | 6001 | 1037 | 0.0 | 11770.3 | 2937 | 63106.1 |
| 1271 | 6002 | 185 | 0.0 | 13925.4 | 1295 | 194.8 |
| | 6003 | 372 | 267.4 | 15439.7 | 2138 | 46023.2 |
| | 6004 | 203 | 97.1 | 10530.7 | 1562 | 8424.0 |
| | 6501 | 1315 | 2137.3 | 43487.3 | 3794 | 20358.2 |
| | 6502 | 1008 | 179.2 | 8742.0 | 2955 | 1503.5 |
| | 6503 | 552 | 226.4 | 35183.4 | 1797 | 50008.6 |
| | 6504 | 2200 | 162.8 | 35539.9 | 4402 | 24058.6 |
| Plasmid | 7001 | 193 | 0.0 | 14868.3 | 3320 | 7321.5 |
| 1269 | 7002 | 1353 | 2153.2 | 7546.6 | 870 | 736.2 |
| | 7003 | 1253 | 133.5 | 21277.4 | 2750 | 25827.7 |
| | 7004 | 1858 | 20846.7 | 10359.9 | 3230 | 19664.0 |
| | 7501 | 2138 | 773.6 | 31272.8 | 927 | 332.0 |
| | 7502 | 2177 | 10547.7 | 16635.5 | 2640 | 7527.3 |
| | 7503 | 1460 | 5086.2 | 5465.1 | 2362 | 938.6 |
| | 7504 | 922 | 0.0 | 38530.4 | 2875 | 2949.3 |

### Example 6. Immunogenicity of Triple-Antigen Constructs

[0390] Example 6 illustrates the capability of triple-antigen adenoviral and nucleic acid constructs expressing the human native full-length membrane-bound MUC1 antigen (MUC1), human cytosolic MSLN antigen (cMSLN), and human truncated (Δ240) cytosolic TERT antigen (TERT_{Δ240} or TERT_{Δ541}) to elicit Ag-specific T and B cell responses to all three encoded cancer antigens.

[0391] Immune Response Study in C57BL/6J Mice Using Electroporation

[0392] Study Design.

[0393] 48 female C57BL/6J mice were immunized with triple-antigen DNA constructs encoding human MUC1, cMSLN, and TERT_{Δ240}. The triple-antigen DNA construct (100 ug) was delivered intramuscularly bilaterally (20 ul total into each tibialis anterior muscle) with concomitant electroporation in a prime/boost regimen, two weeks apart between each vaccination. MUC1-, MSLN-, and TERT-specific cellular responses, and MUC1- and MSLN-specific humoral responses were measured 7 days after the last immunization in an IFN-γ ELISpot assay and ELISA assay, respectively. In total, six different triple-antigen DNA constructs encoding all three antigens linked by 2A peptides were used as follows: MUC1-2A-cMSLN-2A-TERT_{Δ240} (Plasmid 1317), MUC1-2A-TERT_{Δ240}-2A-cMSLN (Plasmid 1318), cMSLN-2A-MUC1-2A-TERT_{Δ240} (Plasmid 1319), cMSLN-2A-TERT_{Δ240}-2A-MUC1 (Plasmid 1320), TERT_{Δ240}-2A-cMSLN-2A-MUC1 (Plasmid 1321), TERT_{Δ240}-2A-MUC1-2A-cMSLN (Plasmid 1322) (see also Example 10).

[0394] Results.

[0395] Table 11 shows the ELISpot data from C57BL/6J splenocytes cultured with peptide pools derived from the MUC1, MSLN, and TERT peptide libraries (see also Peptide Pools Table (Table 18) and Tables 15-17), and the ELISA data from C57BL/6J mouse sera. A positive response is defined as having SFC>100 and IgG titers>99. Numbers in columns 3, 5 and 7 represent # IFN-γ spots/10⁶ splenocytes after restimulation with MUC1, MSLN and TERT peptide pools and background subtraction, respectively. Numbers in bold font indicates that at least 1 peptide pool tested was too numerous to count, therefore the true figure is at least the value stated. Numbers in columns 4 and 6 represent the anti-MUC1 and MSLN IgG titer, respectively (Optical Density (O.D)=1, Limit of Detection (L.O.D)=99.0). As shown in Table 11, the immunogenic MUC1, MSLN, and TERT polypeptides made with the MUC1-, MSLN-, and TERT-expressing triple-antigen constructs are capable of inducing T cell responses against all three antigens, and B cell responses against MUC1, in contrast, only triple-antigen constructs Plasmids 1317, 1318, and 1322 are capable of inducing B cell responses against MSLN.

TABLE 11
T and B cell responses induced by the triple-antigen DNA constructs (1317-1322)
encoding human native full-length membrane-bound MUC1, human cytosolic
MSLN, and human truncated (Δ240) cytosolic TERT antigens in C57BL/6J mice

| | | MUC1 | | MSLN | | TERT |
|---|---|---|---|---|---|---|
| | | # IFN-γ | | # IFN-γ | | # IFN-γ |
| Construct | | spots/10⁶ | | spots/10⁶ | | spots/10⁶ |
| ID | Animal | splenocytes | IgG titer | splenocytes | IgG titer | splenocytes |
| Plasmid | 1 | 1433 | 1772.7 | 369 | 3069.8 | 2920 |
| 1317 | 2 | 1979 | 5214.6 | 2764 | 9420.3 | 3133 |
| | 3 | 1729 | 3229.9 | 464 | 6205.6 | 2413 |
| | 4 | 1570 | 3220.1 | 1108 | 3892.8 | 3255 |
| | 5 | 1023 | 3837.1 | 497 | 11621.6 | 2293 |
| | 6 | 1509 | 5573.0 | 898 | 2804.0 | 2817 |
| | 7 | 1095 | 3905.2 | 163 | 1745.6 | 2311 |
| | 8 | 1778 | 5147.2 | 2140 | 7709.5 | 3233 |
| Plasmid | 9 | 842 | 7873.1 | 652 | 99.0 | 2875 |
| 1319 | 10 | 1443 | 8987.3 | 760 | 99.0 | 3652 |
| | 11 | 2832 | 7789.4 | 343 | 99.0 | 3510 |
| | 12 | 1797 | 13430.0 | 603 | 99.0 | 3863 |
| | 13 | 1351 | 9923.4 | 901 | 99.0 | 3443 |
| | 14 | 1626 | 3242.3 | 917 | 99.0 | 3541 |
| | 15 | 829 | 7361.0 | 563 | 99.0 | 3003 |
| | 16 | 1165 | 6143.4 | 871 | 99.0 | 3080 |
| Plasmid | 17 | 475 | 1352.7 | 160 | 194.3 | 704 |
| 1318 | 18 | 1027 | 6933.6 | 188 | 99.0 | 2413 |
| | 19 | 1424 | 1886.9 | 557 | 213.2 | 2244 |
| | 20 | 2241 | 3864.1 | 597 | 326.3 | 2799 |
| | 21 | 1447 | 5095.6 | 240 | 1926.4 | 2787 |
| | 22 | 789 | 3992.6 | 116 | 1198.2 | 2455 |
| | 23 | 700 | 4968.0 | 195 | 3040.2 | 2221 |
| | 24 | 1584 | 5403.9 | 231 | 3017.3 | 3310 |
| Plasmid | 25 | 2043 | 4173.3 | 908 | 99.0 | 4896 |
| 1320 | 26 | 2307 | 4158.6 | 1609 | 99.0 | 4532 |
| | 27 | 2271 | 10258.5 | 1281 | 99.0 | 3807 |
| | 28 | 829 | 6768.5 | 243 | 99.0 | 2420 |
| | 29 | 1355 | 7163.9 | 624 | 99.0 | 2993 |
| | 30 | 1938 | 7404.1 | 673 | 99.0 | 3214 |
| | 31 | 1373 | 3941.5 | 386 | 99.0 | 3139 |
| | 32 | 1581 | 7843.7 | 393 | 99.0 | 3745 |
| Plasmid | 33 | 964 | 5579.2 | 225 | 99.0 | 2500 |
| 1321 | 34 | 690 | 6364.0 | 141 | 99.0 | 2674 |
| | 35 | 923 | 8861.3 | 99 | 99.0 | 2492 |
| | 36 | 767 | 10270.5 | 573 | 99.0 | 2467 |
| | 37 | 1039 | 3211.9 | 148 | 99.0 | 1785 |
| | 38 | 1283 | 8614.10 | 308 | 99.0 | 2042 |
| | 39 | 1929 | 15147.2 | 276 | 99.0 | 2805 |
| | 40 | 529 | 3581.12 | 199 | 99.0 | 1412 |
| Plasmid | 41 | 1017 | 5933.07 | 281 | 7430.2 | 2702 |
| 1322 | 42 | 1936 | 5333.3 | 271 | 112.5 | 3317 |
| | 43 | 1719 | 3113.3 | 484 | 7054.2 | 3711 |
| | 44 | 994 | 4422.0 | 254 | 4499.5 | 2797 |
| | 45 | 1824 | 3902.0 | 1710 | 3246.3 | 5541 |
| | 46 | 1435 | 1189.9 | 416 | 1122.6 | 4654 |
| | 47 | 2430 | 686.7 | 613 | 99.0 | 4548 |
| | 48 | 1931 | 7288.6 | 1665 | 2088.1 | 4408 |

[0396] Immune Response Study in C57BL/6J Mice Using Adenoviral Vectors

[0397] Study Design.

[0398] 36 female C57BL/6J mice were primed with triple-antigen adenoviral vectors encoding human MUC1, cMSLN, and TERT_{Δ240} or TERT_{Δ541}, at 1e10 viral particles by intramuscular injection (50 ul). 28 days later, animals were boosted with triple-antigen DNA constructs (50 ug) delivered intramuscularly bilaterally (20 ul total into each tibialis anterior muscle) with concomitant electroporation. MUC1-, MSLN-, and TERT-specific cellular responses, and MUC1- and MSLN-specific humoral responses were measured 7 days after the last immunization in an IFN-γ ELISpot and ICS assay, and an ELISA assay, respectively. In total, three triple-antigen adenoviral and DNA constructs encoding MUC1, cMSLN, and TERT_{Δ240} linked by 2A peptides, and three triple-antigen adenoviral and DNA constructs encoding MUC1, cMSLN, and TERT_{Δ541} linked by 2A peptides were used as follows: MUC1-2A-cMSLN-2A-TERT_{Δ240} (Plasmid 1317), cMSLN-2A-MUC1-2A-TERT_{Δ240} (Plasmid 1319), cMSLN-2A-TERT_{Δ240}-2A-MUC1 (Plasmid 1320), and MUC1-2A-cMSLN-2A-TERT_{Δ541} (Plasmid 1351), cMSLN-2A-MUC1-2A-TERT_{Δ541} (Plasmid 1352), cMSLN-2A-TERT_{Δ541}-2A-MUC1 (Plasmid 1353) (see also Example 10).

[0399] Results.

[0400] Table 12 shows the ELISpot data from C57BL/6J splenocytes cultured with peptide pools derived from the MUC1, MSLN, and TERT peptide libraries (see also Peptide Pools Table (Table 18) and Tables 15-17), the ICS data from C57BL/6J splenocytes cultured with TERT peptide aa1025-1039, and the ELISA data from C57BL/6J mouse sera. A positive response is defined as having SFC>100, a frequency of IFN-γ⁺ CD8⁺ T cells>0.1%, and IgG titers>99. Numbers in columns 3, 5, and 7 represent # IFN-γ spots/10⁶ splenocytes after restimulation with MUC1, MSLN and TERT peptide pools, and background subtraction, respectively. Numbers in bold font indicate that at least 1 peptide pool tested was too numerous to count, therefore the true figure is at least the value stated. Numbers in column 8 represent # IFN-γ⁺ CD8⁺ T cells/10⁶ CD8⁺ T cells after restimulation with TERT-specific peptide TERT aa1025-1039, and background subtraction. Numbers in columns 4 and 6 represent the anti-MUC1 and anti-MSLN IgG titer, respectively (Optical Density (O.D)=1, Limit of Detection (L.O.D)=99.0). As shown in Table 12, the immunogenic MUC1, MSLN, and TERT polypeptides made with MUC1-, MSLN-, and TERT-expressing triple-antigen constructs are capable of inducing T cell responses against all three antigens, and B cell responses against MUC1; in contrast, only triple-antigen constructs 1317 and 1351 are capable of inducing B cell responses against MSLN.

TABLE 12A
MUC1-specific T and B cell responses induced by the triple-antigen
adenoviral AdC68Y and DNA constructs (Plasmids 1317, 1319, and
1320) encoding human native full-length membrane-bound MUC1,
human cytosolic MSLN, and human truncated (Δ240) cytosolic
TERT antigens, and by the triple-antigen adenoviral AdC68Y
and DNA constructs (Plasmids 1351-1353) encoding human
native full-length membrane-bound MUC1, human cytosolic MSLN,
and human truncated (Δ541) cytosolic TERT antigens in
C57BL/6J mice

MUC1

| | | # IFN-γ spots/10⁶ | IgG |
|---|---|---|---|
| Construct ID | Animal # | splenocytes | titer |
| Plasmid 1317 | 19 | 3119 | 11653.4 |
| | 20 | 3347 | 11941.0 |
| | 21 | 1712 | 7287.2 |
| | 22 | 3604 | 14391.7 |
| | 23 | 2349 | 12599.0 |
| | 24 | 2457 | 12969.1 |
| Plasmid 1319 | 25 | 1865 | 15018.2 |
| | 26 | 1661 | 8836.8 |
| | 27 | 1657 | 13335.1 |
| | 28 | 1933 | 17854.1 |
| | 29 | 1293 | 10560.2 |
| | 30 | 2035 | 10477.6 |
| Plasmid 1320 | 31 | 2377 | 2667.4 |
| | 32 | 1629 | 11322.4 |
| | 33 | 1632 | 9562.9 |
| | 34 | 1259 | 7092.0 |
| | 35 | 2024 | 11306.8 |
| | 36 | 861 | 1785.1 |
| Plasmid 1351 | 37 | 2615 | 10253.1 |
| | 38 | 1595 | 13535.4 |
| | 39 | 1889 | 14557.4 |
| | 40 | 1869 | 15470.1 |
| | 41 | 1979 | 11944.4 |
| | 42 | 1892 | 18093.0 |
| Plasmid 1352 | 43 | 1593 | 22002.4 |
| | 44 | 2133 | 11821.6 |
| | 45 | 1341 | 48297.5 |
| | 46 | 1673 | 8682.2 |
| | 47 | 1933 | 11621.7 |
| | 48 | 1767 | 19318.1 |
| Plasmid 1353 | 49 | 1859 | 4826.7 |
| | 50 | 1845 | 3060.0 |
| | 51 | 1784 | 4499.9 |
| | 52 | 2209 | 2940.9 |
| | 53 | 2177 | 7738.32 |
| | 54 | 1821 | 2985.5 |

TABLE 12B
MSLN-specific T and B cell responses induced by the triple-antigen
adenoviral AdC68Y and DNA constructs (Plasmids 1317, 1319,
and 1320) encoding human native full-length membrane-bound MUC1,
human cytosolic MSLN, and human truncated (Δ240) cytosolic
TERT antigens, and by the triple-antigen adenoviral AdC68Y and
DNA constructs (Plasmids 1351-1353) encoding human native
full-length membrane-bound MUC1, human cytosolic MSLN, and
human truncated (Δ541) cytosolic TERT antigens in C57BL/6J mice

MSLN

| | | # IFN-γ spots/10⁶ | |
|---|---|---|---|
| Construct ID | Animal # | splenocytes | IgG titer |
| Plasmid 1317 | 19 | 856 | 99.0 |
| | 20 | 911 | 1581.9 |
| | 21 | 336 | 1401.2 |
| | 22 | 820 | 767.3 |
| | 23 | 721 | 99.0 |
| | 24 | 1067 | 99.0 |
| Plasmid 1319 | 25 | 708 | 99.0 |
| | 26 | 368 | 99.0 |
| | 27 | 769 | 99.0 |
| | 28 | 1620 | 99.0 |
| | 29 | 880 | 99.0 |
| | 30 | 427 | 99.0 |
| Plasmid 1320 | 31 | 424 | 99.0 |
| | 32 | 399 | 99.0 |
| | 33 | 289 | 99.0 |
| | 34 | 321 | 99.0 |
| | 35 | 540 | 99.0 |
| | 36 | 316 | 99.0 |
| Plasmid 1351 | 37 | 685 | 99.0 |
| | 38 | 804 | 281.3 |
| | 39 | 505 | 155.8 |
| | 40 | 333 | 99.0 |
| | 41 | 285 | 2186.7 |
| | 42 | 444 | 99.0 |
| Plasmid 1352 | 43 | 1504 | 99.0 |
| | 44 | 421 | 99.0 |
| | 45 | 1293 | 99.0 |
| | 46 | 581 | 99.0 |
| | 47 | 747 | 99.0 |
| | 48 | 821 | 99.0 |
| Plasmid 1353 | 49 | 984 | 99.0 |
| | 50 | 740 | 99.0 |
| | 51 | 412 | 99.0 |
| | 52 | 1266 | 99.0 |
| | 53 | 764 | 99.0 |
| | 54 | 432 | 99.0 |

TABLE 12 C
TERT-specific T cell responses induced by the triple-antigen
adenoviral AdC68Y and DNA constructs (Plasmids 1317, 1319,
and 1320) encoding human native full-length membrane-bound
MUC1, human cytosolic MSLN, and human truncated (Δ240)
cytosolic TERT antigens, and by the triple-antigen adenoviral
AdC68Y and DNA constructs (Plasmids 1351-1353) encoding
human native full-length membrane-bound MUC1, human
cytosolic MSLN, and human truncated (Δ541) cytosolic
TERT antigens in C57BL/6J mice

| | | TERT | |
|---|---|---|---|
| | | # IFN-γ spots/10⁶ | % CD8⁺ T cells being |
| Construct ID | Animal # | splenocytes | IFN-γ⁺ |
| Plasmid 1317 | 19 | 5730 | 4.1 |
| | 20 | 4119 | 2.0 |
| | 21 | 4587 | 4.9 |
| | 22 | 5522 | 4.3 |
| | 23 | 5120 | 3.6 |
| | 24 | 4383 | 4.5 |
| Plasmid 1319 | 25 | 4995 | 3.1 |
| | 26 | 4628 | 7.1 |
| | 27 | 2892 | 2.7 |
| | 28 | 4977 | 4.7 |
| | 29 | 3913 | 5.2 |
| | 30 | 3153 | 2.9 |
| Plasmid 1320 | 31 | 3732 | 3.6 |
| | 32 | 4308 | 4.3 |
| | 33 | 4153 | 1.4 |
| | 34 | 5067 | 5.2 |
| | 35 | 5351 | 5.1 |
| | 36 | 3268 | 5.0 |
| Plasmid 1351 | 37 | 3766 | 2.4 |
| | 38 | 5805 | 7.7 |
| | 39 | 4391 | 4.7 |
| | 40 | 3401 | 2.7 |
| | 41 | 3874 | 4.0 |
| | 42 | 3260 | 2.5 |
| Plasmid 1352 | 43 | 5235 | 5.0 |
| | 44 | 2853 | 3.4 |
| | 45 | 2876 | 3.5 |
| | 46 | 2610 | 3.3 |
| | 47 | 3275 | 2.8 |
| | 48 | 3009 | 3.3 |
| Plasmid 1353 | 49 | 5806 | 9.1 |
| | 50 | 6114 | 6.1 |
| | 51 | 4759 | 6.5 |
| | 52 | 5157 | 4.8 |
| | 53 | 3999 | 2.9 |
| | 54 | 4719 | 3.3 |

[0401] Immune Response Study in HLA-A24 Mice

[0402] Study Design.

[0403] Eight mixed gender HLA-A24 mice were primed with an adenoviral AdC68Y triple-antigen construct (Plasmid 1317; MUC1-2A-cMSLN-2A-TERT_{Δ240}) encoding human MUC1, cMSLN, and TERT_{Δ240} at 1e10 viral particles by intramuscular injection (50 ul into each tibialis anterior muscle). 14 days later, animals were boosted intramuscularly with 50 ug triple-antigen DNA construct (Plasmid 1317) encoding the same three antigens (20 ul delivered into each tibialis anterior muscle with concomitant electroporation). HLA-A24-restricted MUC1-specific cellular responses were measured 7 days after the last immunization in an IFN-γ ELISpot assay.

[0404] Results.

[0405] Table 13 shows the ELISpot data from HLA-A24 splenocytes cultured with the MUC1 peptide aa524-532. A positive response is defined as having SFC>50. Numbers in column 3 represent # IFN-γ spots/10⁶ splenocytes after restimulation with MUC1 peptide aa524-532 and background subtraction. As shown in Table 13, the immunogenic MUC1 polypeptides made with the MUC1-, MSLN-, and TERT-expressing triple-antigen construct 1317 are capable of inducing HLA-A24-restricted MUC1 peptide aa524-532-specific CD8⁺ T cell responses. Importantly, T cell responses derived from cancer patients against this specific MUC1 peptide have been shown to correlate with anti-tumor efficacy in vitro (Jochems C et al., Cancer Immunol Immunother (2014) 63:161-174) demonstrating the importance of raising cellular responses against this specific epitope.

TABLE 13
HLA-A24-restricted MUC1 peptide aa524-532-specific T cell
responses induced by the triple-antigen adenoviral and DNA
constructs Plasmid 1317 (MUC1-2A-cMSLN-2A-TERT_{Δ240})
encoding human native full-length membrane-bound MUC1,
human cytosolic MSLN, and human truncated (Δ240) cytosolic
TERT antigens in HLA-A24 mice

| | | # IFN-γ spots/10⁶ |
|---|---|---|
| Construct ID | Animal # | splenocytes |
| Plasmid 1317 | 89 | 89 |
| | 90 | 289 |
| | 91 | 291 |
| | 92 | 207 |
| | 93 | 83 |
| | 94 | 295 |
| | 95 | 82 |
| | 96 | 100 |

[0406] Immune Response Study in Monkeys

[0407] Study Design.

[0408] 24 Chinese cynomolgus macaques were primed with AdC68Y adenoviral vectors encoding human native full-length membrane-bound MUC1 (MUC1), human cytoplasmic MSLN (cMSLN), and human truncated (Δ240) cytosolic TERT (TERT_{Δ240}) antigens at 2e11 viral particles by bilateral intramuscular injection (1 mL total). 28 and 56 days later, animals were boosted with DNA encoding the same three antigens delivered intramuscularly bilaterally via electroporation (2 mL total). Anti-CTLA-4 was administered subcutaneously on days 1 (32 mg), 29 (50 mg) and 57 (75 mg). 21 days after the last immunization, animals were bled and PBMCs and serum isolated to assess MUC1-, MSLN-, and TERT-specific cellular (ELISpot, ICS) and MUC1- and MSLN-specific humoral (ELISA) responses, respectively. In total, three triple-antigen adenoviral and DNA constructs encoding MUC1, cMSLN, and TERT_{Δ240} linked by 2A peptides were evaluated: MUC1-2A-cMSLN-2A-TERT_{Δ240} (Plasmid 1317), cMSLN-2A-MUC1-2A-TERT_{Δ240} (Plasmid 1319), and cMSLN-2A-TERT_{Δ240}-2A-MUC1 (Plasmid 1320).

[0409] Results.

[0410] Tables 14A, 14B, and 14C show the ELISpot and ICS data from Chinese cynomolgus macaques' PBMCs cultured with peptide pools derived from the MUC1, MSLN, and TERT peptide libraries (see also Peptide Pools Table (Table 18) and Tables 15-17), and the ELISA data from Chinese cynomolgus macaques' sera. A positive response is defined as having SFC>50, IFN-γ⁺ CD8⁺ T cells/1e6 CD8⁺ T cells>50, and IgG titers>99. Numbers in columns 3, 6, and 9 represent # IFN-γ spots/10⁶ splenocytes after restimulation with MUC1, MSLN, and TERT peptide pools, and background subtraction, respectively. Numbers in bold font indicate that at least 1 peptide pool tested was too numerous to count, therefore the true figure is at least the value stated. Numbers in columns 4, 7, and 10 represent # IFN-γ⁺ CD8⁺ T cells/10⁶ CD8⁺ T cells after restimulation with MUC1, MSLN, and TERT peptide pools, respectively, and background subtraction. Numbers in column 5 and 8 represent the anti-MUC1 and anti-MSLN IgG titer (Optical Density (O.D)=1, Limit of Detection (L.O.D)=99.0), respectively. As shown in Table 14, the immunogenic MUC1, MSLN, and TERT polypeptides made with MUC1-, MSLN-, and TERT-expressing triple-Ag constructs are capable of inducing cellular responses against all three antigens, and humoral responses against MUC1. However, only triple-antigen construct 1317 is able to induce significant MSLN-specific B cell responses.

TABLE 14A
MUC1-specific T and B cell responses induced by the triple-antigen
adenoviral AdC68Y and DNA constructs (Plasmids 1317, 1319, and
1320) encoding human native full-length membrane-bound MUC1,
human cytoplasmic MSLN, and human truncated (Δ240) cytosolic
TERT antigens in Chinese cynomolgus macaques

| | | MUC1 | | |
|---|---|---|---|---|
| | | # IFN-γ | # IFN-γ⁺ CD8⁺ T | |
| | | spots/10⁶ | cells/1e6 CD8⁺ | IgG |
| Construct ID | Animal # | splenocytes | T cells | titer |
| Plasmid 1317 | 4001 | 1319 | 0.0 | 27565.9 |
| | 4002 | 2664 | 48690.6 | 55784.5 |
| | 4003 | 373 | 322.3 | 16151.0 |
| | 4004 | 1617 | 8476.8 | 29970.0 |
| | 4501 | 2341 | 1359.0 | 24289.1 |
| | 4502 | 1157 | 0.0 | 21841.4 |
| | 4503 | 2286 | 3071.1 | 63872.6 |
| | 4504 | 1638 | 2172.4 | 45515.2 |
| Plasmid 1319 | 5001 | 88 | 0.0 | 22857.2 |
| | 5002 | 1308 | 0.0 | 29024.8 |
| | 5003 | 294 | 0.0 | 13356.0 |
| | 5004 | 527 | 468.8 | 15029.1 |
| | 5501 | 1296 | 2088.2 | 44573.6 |
| | 5502 | 1377 | 6624.2 | 23185.5 |
| | 5503 | 1302 | 0.0 | 25699.1 |
| | 5504 | 2499 | 10403.1 | 14456.8 |
| Plasmid 1320 | 6001 | 486 | 0.0 | 24454.1 |
| | 6002 | 1742 | 412.3 | 31986.3 |
| | 6003 | 1369 | 1154.9 | 23966.8 |
| | 6004 | 1129 | 561.6 | 39738.0 |
| | 6501 | 1673 | 447.4 | 21119.6 |
| | 6502 | 1215 | 0.0 | 18092.2 |
| | 6503 | 1817 | 3332.4 | 16364.6 |
| | 6504 | 1212 | 1157.1 | 17340.2 |

TABLE 14B
MSLN-specific T and B cell responses induced by the triple-antigen
adenoviral AdC68Y and DNA constructs (Plasmids 1317, 1319, and
1320) encoding human native full-length membrane-bound MUC1,
human cytoplasmic MSLN, and human truncated (Δ240) cytosolic
TERT antigens in Chinese cynomolgus macaques

| | | MSLN | | |
|---|---|---|---|---|
| | | # IFN-γ | # IFN-γ⁺ CD8⁺ | |
| | | spots/10⁶ | T cells/1e6 CD8⁺ | |
| Construct ID | Animal # | splenocytes | T cells | IgG titer |
| Plasmid 1317 | 4001 | 1479 | 3732.4 | 7683.9 |
| | 4002 | 1587 | 1795.3 | 6147.4 |
| | 4003 | 648 | 884.7 | 3197.3 |
| | 4004 | 164 | 0.0 | 4561.3 |
| | 4501 | 2279 | 15469.0 | 6350.0 |
| | 4502 | 1930 | 22480.2 | 11699.5 |
| | 4503 | 1234 | 865.1 | 19065.6 |
| | 4504 | 1543 | 2348.1 | 4492.7 |
| Plasmid 1319 | 5001 | 258 | 426.6 | 99.0 |
| | 5002 | 1855 | 2030.9 | 232.0 |
| | 5003 | 1505 | 642.8 | 99.0 |
| | 5004 | 1275 | 2410.4 | 243.3 |
| | 5501 | 282 | 0.0 | 99.0 |
| | 5502 | 732 | 558.6 | 418.4 |
| | 5503 | 2070 | 4529.3 | 130.9 |
| | 5504 | 871 | 3466.9 | 99.0 |
| Plasmid 1320 | 6001 | 2446 | 6723.2 | 1381 |
| | 6002 | 1953 | 3185.0 | 184.8 |
| | 6003 | 2045 | 4053.7 | 99.0 |
| | 6004 | 395 | 0.0 | 419.3 |
| | 6501 | 1742 | 5813.1 | 322.7 |
| | 6502 | 1617 | 12311.5 | 99.0 |
| | 6503 | 448 | 0.0 | 285.6 |
| | 6504 | 338 | 0.0 | 168.8 |

TABLE 14C
TERT-specific T cell responses induced by the triple-antigen
adenoviral AdC68Y and DNA constructs (Plasmids 1317, 1319,
and 1320) encoding human native full-length membrane-bound
MUC1, human cytoplasmic MSLN, and human truncated (Δ240)
cytosolic TERT antigens in Chinese cynomolgus macaques

| | | TERT | |
|---|---|---|---|
| | | # IFN-γ spots/10⁶ | # IFN-γ⁺ CD8⁺ T cells/ |
| Construct ID | Animal # | splenocytes | 1e6 CD8⁺ T cells |
| Plasmid 1317 | 4001 | 1723 | 8843.8 |
| | 4002 | 870 | 658.1 |
| | 4003 | 2128 | 5976.1 |
| | 4004 | 420 | 0.0 |
| | 4501 | 2136 | 999.1 |
| | 4502 | 2342 | 1195.6 |
| | 4503 | 1966 | 6701.1 |
| | 4504 | 2436 | 6985.5 |
| Plasmid 1319 | 5001 | 1018 | 1724.4 |
| | 5002 | 2121 | 713.8 |
| | 5003 | 2184 | 324.3 |
| | 5004 | 822 | 714.4 |
| | 5501 | 462 | 1851.4 |
| | 5502 | 325 | 692.9 |
| | 5503 | 401 | 0.0 |
| | 5504 | 517 | 0.0 |
| Plasmid | 6001 | 3011 | 8615.5 |
| 1320 | 6002 | 2825 | 2002.0 |
| | 6003 | 1489 | 1235.8 |
| | 6004 | 2272 | 2462.2 |
| | 6501 | 2428 | 1362.2 |
| | 6502 | 1875 | 4649.5 |
| | 6503 | 2515 | 8493.2 |
| | 6504 | 2584 | 5171.0 |

TABLE 15
Human MUC1 Peptide Library peptide pools and
corresponding amino acid sequences

| Amino Acid | | |
|---|---|---|
| Sequence | Peptide # | SEQ ID NO |
| MASTPGTQSPFFLLL | 1aAS | 132 |
| TPGTQSPFFLLLLLT | 1bAS | 133 |
| TQSPFFLLLLLTVLT | 2 | 134 |
| FFLLLLLTVLTVVTG | 3 | 135 |
| LLLTVLTVVTGSGHA | 4 | 136 |
| VLTVVTGSGHASSTP | 5 | 137 |
| VTGSGHASSTPGGEK | 6 | 138 |
| GHASSTPGGEKETSA | 7 | 139 |
| STPGGEKETSATQRS | 8 | 140 |
| GEKETSATQRSSVPS | 9 | 141 |
| TSATQRSSVPSSTEK | 10 | 142 |
| QRSSVPSSTEKNAVS | 11 | 143 |
| VPSSTEKNAVSMTSS | 12 | 144 |
| TEKNAVSMTSSVLSS | 13 | 145 |
| AVSMTSSVLSSHSPG | 14 | 146 |
| TSSVLSSHSPGSGSS | 15 | 147 |
| LSSHSPGSGSSTTQG | 16 | 148 |
| SPGSGSSTTQGQDVT | 17 | 149 |
| GSSTTQGQDVTLAPA | 18 | 150 |
| TQGQDVTLAPATEPA | 19 | 151 |
| DVTLAPATEPASGSA | 20 | 152 |
| APATEPASGSAATWG | 21 | 153 |
| EPASGSAATWGQDVT | 22 | 154 |
| GSAATWGQDVTSVPV | 23 | 155 |
| TWGQDVTSVPVTRPA | 24 | 156 |
| DVTSVPVTRPALGST | 25 | 157 |
| VPVTRPALGSTTPPA | 26 | 158 |
| RPALGSTTPPAHDVT | 27 | 159 |
| GSTTPPAHDVTSAPD | 28 | 160 |
| PPAHDVTSAPDNKPA | 29 | 161 |
| DVTSAPDNKPAPGST | 30 | 162 |
| APDNKPAPGSTAPPA | 31 | 163 |
| KPAPGSTAPPAHGVT | 32 | 164 |
| GSTAPPAHGVTSAPD | 33 | 165 |
| PPAHGVTSAPDTRPA | 34 | 166 |
| GVTSAPDTRPAPGST | 35 | 167 |
| APDTRPAPGSTAPPA | 36 | 168 |
| RPAPGSTAPPAHGVT | 37 | 169 |
| GVTSAPDTRPALGST | 55 | 170 |
| APDTRPALGSTAPPV | 56 | 171 |
| RPALGSTAPPVHNVT | 57 | 172 |
| GSTAPPVHNVTSASG | 58 | 173 |
| PPVHNVTSASGSASG | 59 | 174 |
| NVTSASGSASGSAST | 60 | 175 |
| ASGSASGSASTLVHN | 61 | 176 |
| ASGSASTLVHNGTSA | 62 | 177 |
| ASTLVHNGTSARATT | 63 | 178 |
| VHNGTSARATTTPAS | 64 | 179 |
| TSARATTTPASKSTP | 65 | 180 |
| ATTTPASKSTPFSIP | 66 | 181 |
| PASKSTPFSIPSHHS | 67 | 182 |
| STPFSIPSHHSDTPT | 68 | 183 |
| SIPSHHSDTPTTLAS | 69 | 184 |
| HHSDTPTTLASHSTK | 70 | 185 |
| TPTTLASHSTKTDAS | 71 | 186 |
| LASHSTKTDASSTHH | 72 | 187 |
| STKTDASSTHHSSVP | 73 | 188 |
| DASSTHHSSVPPLTS | 74 | 189 |
| THHSSVPPLTSSNHS | 75 | 190 |
| SVPPLTSSNHSTSPQ | 76 | 191 |
| LTSSNHSTSPQLSTG | 77 | 192 |
| NHSTSPQLSTGVSFF | 78 | 193 |
| SPQLSTGVSFFFLSF | 79 | 194 |
| STGVSFFFLSFHISN | 80 | 195 |
| SFFFLSFHISNLQFN | 81 | 196 |
| LSFHISNLQFNSSLE | 82 | 197 |
| ISNLQFNSSLEDPST | 83 | 198 |
| QFNSSLEDPSTDYYQ | 84 | 199 |
| SLEDPSTDYYQELQR | 85 | 200 |
| PSTDYYQELQRDISE | 86 | 201 |
| YYQELQRDISEMFLQ | 87 | 202 |
| LQRDISEMFLQIYKQ | 88 | 203 |
| ISEMFLQIYKQGGFL | 89 | 204 |
| FLQIYKQGGFLGLSN | 90 | 205 |
| YKQGGFLGLSNIKFR | 91 | 206 |
| GFLGLSNIKFRPGSV | 92X | 207 |
| LSNIKFRPGSVVVQL | 93X | 208 |

| | | |
|---|---|---|
| KFRPGSVVVQLTLAF | 94X | 209 |
| GSVVVQLTLAFREGT | 95X | 210 |
| VVVQLTLAFREGTIN | 95XX | 211 |
| QLTLAFREGTINVHD | 96 | 212 |

| | | |
|---|---|---|
| AFREGTINVHDVETQ | 97 | 213 |
| GTINVHDVETQFNQY | 98 | 214 |
| VHDVETQFNQYKTEA | 99 | 215 |
| ETQFNQYKTEAASRY | 100 | 216 |
| NQYKTEAASRYNLTI | 101 | 217 |
| TEAASRYNLTISDVS | 102 | 218 |
| SRYNLTISDVSVSDV | 103 | 219 |
| LTISDVSVSDVPFPF | 104 | 220 |
| DVSVSDVPFPFSAQS | 105 | 221 |
| SDVPFPFSAQSGAGV | 106 | 222 |
| FPFSAQSAGVPGVVG | 107 | 223 |
| AQSGAGVPGWGIALL | 108 | 224 |
| AGVPGWGIALLVLVC | 109 | 225 |
| GWGIALLVLVCVLVA | 110 | 226 |
| ALLVLVCVLVALAIV | 111 | 227 |
| LVCVLVALAIVYLIA | 112 | 228 |
| LVALAIVYLIALAVC | 113 | 229 |
| AIVYLIALAVCQCRR | 114 | 230 |
| LIALAVCQCRRKNYG | 115 | 231 |
| AVCQCRRKNYGQLDI | 116 | 232 |
| CRRKNYGQLDIFPAR | 117 | 233 |
| NYGQLDIFPARDTYH | 118 | 234 |
| LDIFPARDTYHPMSE | 119 | 235 |
| PARDTYHPMSEYPTY | 120 | 236 |
| TYHPMSEYPTYHTHG | 121 | 237 |
| MSEYPTYHTHGRYVP | 122 | 238 |
| PTYHTHGRYVPPSST | 123 | 239 |
| THGRYVPPSSTDRSP | 124 | 240 |
| YVPPSSTDRSPYEKV | 125 | 241 |
| SSTDRSPYEKVSAGN | 126 | 242 |
| RSPYEKVSAGNGGSS | 127 | 243 |
| EKVSAGNGGSSLSYT | 128 | 244 |
| AGNGGSSLSYTNPAV | 129 | 245 |
| GSSLSYTNPAVAAAS | 130 | 246 |
| LSYTNPAVAAASANL | 131 | 247 |

TABLE 16
Human MSLN Peptide Library peptide pools and
corresponding amino acid sequences

| Amino Acid Sequence | Peptide # | SEQ ID NO |
|---|---|---|
| MASLPTARPLLGSCG | 1aS | 248 |
| TARPLLGSCGTPALG | 2 | 249 |
| LLGSCGTPALGSLLF | 3 | 250 |
| CGTPALGSLLFLLFS | 4 | 251 |
| ALGSLLFLLFSLGWV | 5 | 252 |
| LLFLLFSLGWVQPSR | 6 | 253 |
| LFSLGWVQPSRTLAG | 7 | 254 |
| GWVQPSRTLAGETGQ | 8 | 255 |
| PSRTLAGETGQEAAP | 9 | 256 |
| TLAGETGQEAAPLDG | 10X | 257 |
| TGQEAAPLDGVLANP | 11 | 258 |
| AAPLDGVLANPPNIS | 12 | 259 |
| DGVLANPPNISSLSP | 13 | 260 |
| ANPPNISSLSPRQLL | 14 | 261 |
| NISSLSPRQLLGFPC | 15 | 262 |
| LSPRQLLGFPCAEVS | 16 | 263 |
| QLLGFPCAEVSGLST | 17 | 264 |
| FPCAEVSGLSTERVR | 18 | 265 |
| EVSGLSTERVRELAV | 19 | 266 |
| LSTERVRELAVALAQ | 20 | 267 |
| RVRELAVALAQKNVK | 21 | 268 |
| LAVALAQKNVKLSTE | 22 | 269 |
| LAQKNVKLSTEQLRC | 23 | 270 |
| NVKLSTEQLRCLAHR | 24 | 271 |
| STEQLRCLAHRLSEP | 25 | 272 |
| LRCLAHRLSEPPEDL | 26 | 273 |
| AHRLSEPPEDLDALP | 27 | 274 |
| SEPPEDLDALPLDLL | 28 | 275 |
| EDLDALPLDLLLFLN | 29 | 276 |
| ALPLDLLLFLNPDAF | 30 | 277 |
| DLLLFLNPDAFSGPQ | 31 | 278 |
| FLNPDAFSGPQACTR | 32 | 279 |
| DAFSGPQACTRFFSR | 33 | 280 |
| GPQACTRFFSRITKA | 34 | 281 |
| CTRFFSRITKANVDL | 35 | 282 |
| FSRITKANVDLLPRG | 36 | 283 |
| TKANVDLLPRGAPER | 37 | 284 |
| VDLLPRGAPERQRLL | 38 | 285 |
| PRGAPERQRLLPAAL | 39 | 286 |
| PERQRLLPAALACWG | 40 | 287 |
| RLLPAALACWGVRGS | 41 | 288 |
| AALACWGVRGSLLSE | 42 | 289 |
| CWGVRGSLLSEADVR | 43 | 290 |
| RGSLLSEADVRALGG | 44 | 291 |
| LSEADVRALGGLACD | 45 | 292 |
| DVRALGGLACDLPGR | 46 | 293 |
| LGGLACDLPGRFVAE | 47 | 294 |
| ACDLPGRFVAESAEV | 48 | 295 |
| PGRFVAESAEVLLPR | 49 | 296 |
| VAESAEVLLPRLVSC | 50 | 297 |
| AEVLLPRLVSCPGPL | 51 | 298 |
| LPRLVSCPGPLDQDQ | 52 | 299 |
| VSCPGPLDQDQQEAA | 53 | 300 |
| GPLDQDQQEAARAAL | 54 | 301 |
| QDQQEAARAALQGGG | 55 | 302 |
| EAARAALQGGGPPYG | 56 | 303 |
| AALQGGGPPYGPPST | 57 | 304 |
| GGGPPYGPPSTWSVS | 58 | 305 |
| PYGPPSTWSVSTMDA | 59 | 306 |
| PSTWSVSTMDALRGL | 60 | 307 |
| SVSTMDALRGLLPVL | 61 | 308 |
| MDALRGLLPVLGQPI | 62 | 309 |
| RGLLPVLGQPIIRSI | 63 | 310 |
| PVLGQPIIRSIPQGI | 64 | 311 |
| QPIIRSIPQGIVAAW | 65 | 312 |
| RSIPQGIVAAWRQRS | 66 | 313 |
| QGIVAAWRQRSSRDP | 67 | 314 |
| AAWRQRSSRDPSWRQ | 68 | 315 |
| QRSSRDPSWRQPERT | 69 | 316 |
| RDPSWRQPERTILRP | 70 | 317 |
| WRQPERTILRPRFRR | 71 | 318 |
| ERTILRPRFRREVEK | 72 | 319 |
| LRPRFRREVEKTACP | 73 | 320 |
| FRREVEKTACPSGKK | 74 | 321 |
| VEKTACPSGKKAREI | 75 | 322 |
| ACPSGKKAREIDESL | 76 | 323 |
| GKKAREIDESLIFYK | 77 | 324 |
| REIDESLIFYKKWEL | 78 | 325 |
| ESLIFYKKWELEACV | 79 | 326 |
| FYKKWELEACVDAAL | 80 | 327 |
| WELEACVDAALLATQ | 81 | 328 |
| ACVDAALLATQMDRV | 82 | 329 |
| AALLATQMDRVNAIP | 83 | 330 |
| ATQMDRVNAIPFTYE | 84 | 331 |
| DRVNAIPFTYEQLDV | 85 | 332 |
| AIPFTYEQLDVLKHK | 86 | 333 |
| TYEQLDVLKHKLDEL | 87 | 334 |
| LDVLKHKLDELYPQG | 88 | 335 |
| KHKLDELYPQGYPES | 89 | 336 |
| DELYPQGYPESVIQH | 90 | 337 |
| PQGYPESVIQHLGYL | 91 | 338 |
| PESVIQHLGYLFLKM | 92 | 339 |
| IQHLGYLFLKMSPED | 93 | 340 |
| GYLFLKMSPEDIRKW | 94 | 341 |
| LKMSPEDIRKWNVTS | 95 | 342 |
| PEDIRKWNVTSLETL | 96 | 343 |
| RKWNVTSLETLKALL | 97 | 344 |
| VTSLETLKALLEVNK | 98 | 345 |
| ETLKALLEVNKGHEM | 99 | 346 |
| ALLEVNKGHEMSPQV | 100 | 347 |
| VNKGHEMSPQVATLI | 101 | 348 |
| HEMSPQVATLIDRFV | 102 | 349 |
| PQVATLIDRFVKGRG | 103 | 350 |
| TLIDRFVKGRGQLDK | 104 | 351 |
| RFVKGRGQLDKDTLD | 105 | 352 |
| GRGQLDKDTLDTLTA | 106 | 353 |
| LDKDTLDTLTAFYPG | 107 | 354 |
| TLDTLTAFYPGYLCS | 108 | 355 |
| LTAFYPGYLCSLSPE | 109 | 356 |
| YPGYLCSLSPEELSS | 110 | 357 |
| LCSLSPEELSSVPPS | 111 | 358 |
| SPEELSSVPPSSIWA | 112 | 359 |
| LSSVPPSSIWAVRPQ | 113 | 360 |
| PPSSIWAVRPQDLDT | 114 | 361 |
| IWAVRPQDLDTCDPR | 115 | 362 |
| RPQDLDTCDPRQLDV | 116 | 363 |
| LDTCDPRQLDVLYPK | 117 | 364 |
| DPRQLDVLYPKARLA | 118 | 365 |
| LDVLYPKARLAFQNM | 119 | 366 |
| YPKARLAFQNMNGSE | 120 | 367 |
| RLAFQNMNGSEYFVK | 121 | 368 |
| QNMNGSEYFVKIQSF | 122 | 369 |
| GSEYFVKIQSFLGGA | 123 | 370 |
| FVKIQSFLGGAPTED | 124 | 371 |
| QSFLGGAPTEDLKAL | 125 | 372 |
| GGAPTEDLKALSQQN | 126 | 373 |
| TEDLKALSQQNVSMD | 127 | 374 |
| KALSQQNVSMDLATF | 128 | 375 |
| QQNVSMDLATFMKLR | 129 | 376 |
| SMDLATFMKLRTDAV | 130 | 377 |
| ATFMKLRTDAVLPLT | 131 | 378 |
| KLRTDAVLPLTVAEV | 132 | 379 |
| DAVLPLTVAEVQKLL | 133 | 380 |
| PLTVAEVQKLLGPHV | 134 | 381 |
| AEVQKLLGPHVEGLK | 135 | 382 |
| KLLGPHVEGLKAEER | 136 | 383 |
| PHVEGLKAEERHRPV | 137 | 384 |
| GLKAEERHRPVRDWI | 138 | 385 |
| EERHRPVRDWILRQR | 139 | 386 |
| RPVRDWILRQRQDDL | 140 | 387 |
| DWILRQRQDDLDTLG | 141 | 388 |
| RQRQDDLDTLGLGLQ | 142 | 389 |
| DDLDTLGLGLQGGIP | 143 | 390 |
| TLGLGLQGGIPNGYL | 144 | 391 |
| GLQGGIPNGYLVLDL | 145 | 392 |
| GIPNGYLVLDLSMQE | 146 | 393 |
| YLVLDLSMQEALSGT | 147XX | 394 |
| LDLSMQEALSGTPCL | 148 | 395 |
| MQEALSGTPCLLGPG | 149 | 396 |
| LSGTPCLLGPGPVLT | 150 | 397 |
| PCLLGPGPVLTVLAL | 151 | 398 |
| GPGPVLTVLALLLAS | 152 | 399 |
| PVLTVLALLLASTLA | 153 | 400 |

TABLE 17
Human TERT Peptide Library peptide pools and
corresponding amino acid sequences

| Amino Acid | | |
|---|---|---|
| Sequence | Peptide # | SEQ ID NO |
| RRGAAPEPERTPVGQ | 61 | 401 |
| APEPERTPVGQGSWA | 62 | 402 |
| ERTPVGQGSWAHPGR | 63 | 403 |
| VGQGSWAHPGRTRGP | 64 | 404 |
| SWAHPGRTRGPSDRG | 65 | 405 |
| PGRTRGPSDRGFCVV | 66 | 406 |
| RGPSDRGFCVVSPAR | 67 | 407 |
| DRGFCVVSPARPAEE | 68 | 408 |
| CVVSPARPAEEATSL | 69 | 409 |
| PARPAEEATSLEGAL | 70 | 410 |
| AEEATSLEGALSGTR | 71 | 411 |
| TSLEGALSGTRHSHP | 72 | 412 |
| GALSGTRHSHPSVGR | 73 | 413 |
| GTRHSHPSVGRQHHA | 74 | 414 |
| SHPSVGRQHHAGPPS | 75 | 415 |
| VGRQHHAGPPSTSRP | 76 | 416 |
| HHAGPPSTSRPPRPW | 77 | 417 |
| PPSTSRPPRPWDTPC | 78 | 418 |
| SRPPRPWDTPCPPVY | 79 | 419 |
| RPWDTPCPPVYAETK | 80 | 420 |
| TPCPPVYAETKHFLY | 81 | 421 |
| PVYAETKHFLYSSGD | 82 | 422 |
| ETKHFLYSSGDKEQL | 83 | 423 |
| FLYSSGDKEQLRPSF | 84 | 424 |
| SGDKEQLRPSFLLSS | 85 | 425 |
| EQLRPSFLLSSLRPS | 86 | 426 |
| PSFLLSSLRPSLTGA | 87 | 427 |
| LSSLRPSLTGARRLV | 88 | 428 |
| RPSLTGARRLVETIF | 89 | 429 |
| TGARRLVETIFLGSR | 90 | 430 |
| RLVETIFLGSRPWMP | 91 | 431 |
| TIFLGSRPWMPGTPR | 92 | 432 |
| GSRPWMPGTPRRLPR | 93 | 433 |
| WMPGTPRRLPRLPQR | 94 | 434 |
| TPRRLPRLPQRYWQM | 95 | 435 |
| LPRLPQRYWQMRPLF | 96 | 436 |
| PQRYWQMRPLFLELL | 97 | 437 |
| WQMRPLFLELLGNHA | 98 | 438 |
| PLFLELLGNHAQCPY | 99 | 439 |
| ELLGNHAQCPYGVLL | 100 | 440 |
| NHAQCPYGVLLKTHC | 101 | 441 |
| CPYGVLLKTHCPLRA | 102 | 442 |
| VLLKTHCPLRAAVTP | 103 | 443 |
| THCPLRAAVTPAAGV | 104 | 444 |
| LRAAVTPAAGVCARE | 105 | 445 |
| VTPAAGVCAREKPQG | 106 | 446 |
| AGVCAREKPQGSVAA | 107 | 447 |
| AREKPQGSVAAPEEE | 108 | 448 |
| PQGSVAAPEEEDTDP | 109 | 449 |
| VAAPEEEDTDPRRLV | 110 | 450 |
| EEEDTDPRRLVQLLR | 111 | 451 |
| TDPRRLVQLLRQHSS | 112 | 452 |
| RLVQLLRQHSSPWQV | 113 | 453 |
| LLRQHSSPWQVYGFV | 114 | 454 |
| HSSPWQVYGFVRACL | 115 | 455 |
| WQVYGFVRACLRRLV | 116 | 456 |
| GFVRACLRRLVPPGL | 117 | 457 |
| ACLRRLVPPGLWGSR | 118 | 458 |
| RLVPPGLWGSRHNER | 119 | 459 |
| PGLWGSRHNERRFLR | 120 | 460 |
| GSRHNERRFLRNTKK | 121 | 461 |
| NERRFLRNTKKFISL | 122 | 462 |
| FLRNTKKFISLGKHA | 123 | 463 |
| TKKFISLGKHAKLSL | 124 | 464 |
| ISLGKHAKLSLQELT | 125 | 465 |
| KHAKLSLQELTWKMS | 126 | 466 |
| LSLQELTWKMSVRDC | 127 | 467 |
| ELTWKMSVRDCAWLR | 128 | 468 |
| KMSVRDCAWLRRSPG | 129 | 469 |
| RDCAWLRRSPGVGCV | 130 | 470 |
| WLRRSPGVGCVPAAE | 131 | 471 |
| SPGVGCVPAAEHRLR | 132 | 472 |
| GCVPAAEHRLREEIL | 133 | 473 |
| AAEHRLREEILAKFL | 134 | 474 |
| RLREEILAKFLHWLM | 135 | 475 |
| EILAKFLHWLMSVYV | 136 | 476 |
| KFLHWLMSVYVVELL | 137 | 477 |
| WLMSVYVVELLRSFF | 138 | 478 |
| VYVVELLRSFFYVTE | 139 | 479 |
| ELLRSFFYVTETTFQ | 140 | 480 |
| SFFYVTETTFQKNRL | 141 | 481 |
| VTETTFQKNRLFFYR | 142 | 482 |
| TFQKNRLFFYRKSVW | 143 | 483 |
| NRLFFYRKSVWSKLQ | 144 | 484 |
| FYRKSVWSKLQSIGI | 145 | 485 |
| SVWSKLQSIGIRQHL | 146 | 486 |
| KLQSIGIRQHLKRVQ | 147 | 487 |
| IGIRQHLKRVQLREL | 148 | 488 |
| QHLKRVQLRELSEAE | 149 | 489 |
| RVQLRELSEAEVRQH | 150 | 490 |
| RELSEAEVRQHREAR | 151 | 491 |
| EAEVRQHREARPALL | 152 | 492 |
| RQHREARPALLTSRL | 153 | 493 |
| EARPALLTSRLRFIP | 154 | 494 |
| ALLTSRLRFIPKPDG | 155 | 495 |
| SRLRFIPKPDGLRPI | 156 | 496 |
| FIPKPDGLRPIVNMD | 157 | 497 |
| PDGLRPIVNMDYVVG | 158 | 498 |
| RPIVNMDYVVGARTF | 159 | 499 |
| NMDYVVGARTFRREK | 160 | 500 |
| VVGARTFRREKRAER | 161 | 501 |
| RTFRREKRAERLTSR | 162 | 502 |
| REKRAERLTSRVKAL | 163 | 503 |
| AERLTSRVKALFSVL | 164 | 504 |
| TSRVKALFSVLNYER | 165 | 505 |
| KALFSVLNYERARRP | 166 | 506 |
| SVLNYERARRPGLLG | 167 | 507 |
| YERARRPGLLGASVL | 168 | 508 |
| RRPGLLGASVLGLDD | 169 | 509 |
| LLGASVLGLDDIHRA | 170 | 510 |
| SVLGLDDIHRAWRTF | 171 | 511 |
| LDDIHRAWRTFVLRV | 172 | 512 |
| HRAWRTFVLRVRAQD | 173 | 513 |
| RTFVLRVRAQDPPPE | 174 | 514 |
| LRVRAQDPPPELYFV | 175 | 515 |
| AQDPPPELYFVKVDV | 176 | 516 |
| PPELYFVKVDVTGAY | 177 | 517 |
| YFVKVDVTGAYDTIP | 178 | 518 |
| VDVTGAYDTIPQDRL | 179 | 519 |
| GAYDTIPQDRLTEVI | 180 | 520 |
| TIPQDRLTEVIASII | 181 | 521 |
| DRLTEVIASIIKPQN | 182 | 522 |
| EVIASIIKPQNTYCV | 183 | 523 |
| SIIKPQNTYCVRRYA | 184 | 524 |
| PQNTYCVRRYAVVQK | 185 | 525 |
| YCVRRYAVVQKAAHG | 186 | 526 |
| RYAVVQKAAHGHVRK | 187 | 527 |
| VQKAAHGHVRKAFKS | 188 | 528 |
| AHGHVRKAFKSHVST | 189 | 529 |
| VRKAFKSHVSTLTDL | 190 | 530 |
| FKSHVSTLTDLQPYM | 191 | 531 |
| VSTLTDLQPYMRQFV | 192 | 532 |
| TDLQPYMRQFVAHLQ | 193 | 533 |
| PYMRQFVAHLQETSP | 194 | 534 |
| QFVAHLQETSPLRDA | 195 | 535 |
| HLQETSPLRDAVVIE | 196 | 536 |
| TSPLRDAVVIEQSSS | 197 | 537 |
| RDAVVIEQSSSLNEA | 198 | 538 |
| VIEQSSSLNEASSGL | 199 | 539 |
| SSSLNEASSGLFDVF | 200 | 540 |
| NEASSGLFDVFLRFM | 201 | 541 |
| SGLFDVFLRFMCHHA | 202 | 542 |
| DVFLRFMCHHAVRIR | 203 | 543 |
| RFMCHHAVRIRGKSY | 204 | 544 |
| HHAVRIRGKSYVQCQ | 205 | 545 |
| RIRGKSYVQCQGIPQ | 206 | 546 |
| KSYVQCQGIPQGSIL | 207 | 547 |
| QCQGIPQGSILSTLL | 208 | 548 |
| IPQGSILSTLLCSLC | 209 | 549 |
| SILSTLLCSLCYGDM | 210 | 550 |
| TLLCSLCYGDMENKL | 211 | 551 |
| SLCYGDMENKLFAGI | 212 | 552 |
| GDMENKLFAGIRRDG | 213 | 553 |
| NKLFAGIRRDGLLLR | 214 | 554 |
| AGIRRDGLLLRLVDD | 215 | 555 |
| RDGLLLRLVDDFLLV | 216 | 556 |
| LLRLVDDFLLVTPHL | 217 | 557 |
| VDDFLLVTPHLTHAK | 218 | 558 |
| LLVTPHLTHAKTFLR | 219 | 559 |
| PHLTHAKTFLRTLVR | 220 | 560 |
| HAKTFLRTLVRGVPE | 221 | 561 |
| FLRTLVRGVPEYGCV | 222 | 562 |
| LVRGVPEYGCVVNLR | 223 | 563 |
| VPEYGCVVNLRKTVV | 224 | 564 |
| GCVVNLRKTVVNFPV | 225 | 565 |
| NLRKTVVNFPVEDEA | 226 | 566 |
| TVVNFPVEDEALGGT | 227 | 567 |
| FPVEDEALGGTAFVQ | 228 | 568 |
| DEALGGTAFVQMPAH | 229 | 569 |
| GGTAFVQMPANGLFP | 230 | 570 |
| FVQMPAHGLFPWCGL | 231 | 571 |
| PAHGLFPWCGLLLDT | 232 | 572 |
| LFPWCGLLLDTRTLE | 233 | 573 |
| CGLLLDTRTLEVQSD | 234 | 574 |
| LDTRTLEVQSDYSSY | 235 | 575 |
| TLEVQSDYSSYARTS | 236 | 576 |
| QSDYSSYARTSIRAS | 237 | 577 |
| SSYARTSIRASLTFN | 238 | 578 |
| RTSIRASLTFNRGFK | 239 | 579 |
| RASLTFNRGFKAGRN | 240 | 580 |
| TFNRGFKAGRNMRRK | 241 | 581 |
| GFKAGRNMRRKLFGV | 242 | 582 |
| GRNMRRKLFGVLRLK | 243 | 583 |
| RRKLFGVLRLKCHSL | 244 | 584 |
| FGVLRLKCHSLFLDL | 245 | 585 |
| RLKCHSLFLDLQVNS | 246 | 586 |
| HSLFLDLQVNSLQTV | 247 | 587 |
| LDLQVNSLQTVCTNI | 248 | 588 |
| VNSLQTVCTNIYKIL | 249 | 589 |
| QTVCTNIYKILLLQA | 250 | 590 |
| TNIYKILLLQAYRFH | 251 | 591 |
| KILLLQAYRFHACVL | 252 | 592 |
| LQAYRFHACVLQLPF | 253 | 593 |
| RFHACVLQLPFHQQV | 254 | 594 |
| CVLQLPFHQQVWKNP | 255 | 595 |
| LPFHQQVWKNPTFFL | 256 | 596 |
| QQVWKNPTFFLRVIS | 257 | 597 |
| KNPTFFLRVISDTAS | 258 | 598 |
| FFLRVISDTASLCYS | 259 | 599 |
| VISDTASLCYSILKA | 260 | 600 |
| TASLCYSILKAKNAG | 261 | 601 |
| CYSILKAKNAGMSLG | 262 | 602 |
| LKAKNAGMSLGAKGA | 263 | 603 |
| NAGMSLGAKGAAGPL | 264 | 604 |
| SLGAKGAAGPLPSEA | 265 | 605 |
| KGAAGPLPSEAVQWL | 266 | 606 |
| GPLPSEAVQWLCHQA | 267 | 607 |
| SEAVQWLCHQAFLLK | 268 | 608 |
| QWLCHQAFLLKLTRH | 269 | 609 |
| HQAFLLKLTRHRVTY | 270 | 610 |
| LLKLTRHRVTYVPLL | 271 | 611 |
| TRHRVTYVPLLGSLR | 272 | 612 |
| VTYVPLLGSLRTAQT | 273 | 613 |
| PLLGSLRTAQTQLSR | 274 | 614 |
| SLRTAQTQLSRKLPG | 275 | 615 |
| AQTQLSRKLPGTTLT | 276 | 616 |
| LSRKLPGTTLTALEA | 277 | 617 |
| LPGTTLTALEAAANP | 278 | 618 |
| TLTALEAAANPALPS | 279 | 619 |
| LEAAANPALPSDFKT | 280 | 620 |
| AANPALPSDFKTILD | 281 | 621 |

TABLE 18
Peptide Pools

| Antigen | Peptide Pools |
|---|---|
| MUC1 | 116 sequential 15-mer peptides, overlapping by 11 amino acids, |
| | covering amino acids 1-224 and 945-1255 of the MUC1 |
| | precursor protein of SEQ ID NO: 1 (amino acid sequence of |
| | SEQ ID NO: 8) |
| MSLN | 153 sequential 15-mer peptides, overlapping by 11 amino acids, |
| | covering the entire MSLN precursor protein sequence of |
| | SEQ ID NO: 2. |
| TERT | 221 sequential 15-mer peptides, overlapping by 11 amino acids, |
| | covering the TERT_{Δ240} protein sequence of |
| | SEQ ID NO: 10 (amino acids 239-1132 of SEQ ID NO: 3 |
| | (total 894 amino acids, (excluding the first 238 amino |
| | acids of the native full-length TERT recursor protein of |
| | SEQ ID NO: 3) |

TABLE 19
2A Peptides

| 2A Peptide | Amino Acid Sequence |
|---|---|
| FMD2A | QTLNFDLLKLAGDVESNPGP |
| T2A | EGRGSLLTCGDVEENPGP |
| EMC2A | HYAGYFADLLIHDIETNPGP |
| ERA2A | QCTNYALLKLAGDVESNPGP |
| ERB2A | TILSEGATNFSLLKLAGDVELNPGP |
| PT2A | ATNFSLLKQAGDVEENPGP |

### Example 7. Combination of Vaccines with Immune Modulators

[0411] The following example is provided to illustrate enhanced tumor growth inhibition effects when an anti-cancer vaccine was administered in combination with an anti-Cytotoxic T-Lymphocyte Antigen (CTLA4) antibody and/or an indoleamine 2,3-dioxygenase 1 (IDO1) inhibitor.

[0412] Study Procedures.

[0413] BALB-neuT mice were implanted on study day 0 with TUBO tumor cells by subcutaneous injection. Mice were dosed with 200 mg/Kg of 3-(5-fluoro-1H-indol-3-yl)pyrrolidine-2,5-dione (IDO1 inhibitor) or vehicle twice daily from study day 7 using oral gavage. Comparator groups were sham dosed with vehicle from study day 7 onwards. Appropriated mice were immunized on study day 10 with 1 e10 Viral Particles of an adenovirus vector engineered to express rat HER2 (rHER2) (rHER2 vaccine) or vector lacking the rHER2 transgene (control vaccine), by intramuscular injection. Subsequently, 250 ug of an anti-CTLA4 antibody (murine monoclonal antibody to CTLA-4, clone 9D9) or an IgG2 isotype control monoclonal antibody was injected subcutaneously in close proximity to lymph nodes draining the site of adenovirus vector injection. Every two weeks thereafter, mice were immunized with 100 ug of a DNA plasmid encoding rHER2 (rHER2 vaccine) or a DNA plasmid lacking the rHER2 transgene (control vaccine) by electroporation. Subsequent to the DNA plasmid administration, 250 ug of the anti-CTLA4 antibody was injected subcutaneously in close proximity to lymph nodes draining the site of DNA plasmid injection. To track tumor progression, subcutaneous tumor volumes were measured twice a week throughout the study. Animals with subcutaneous tumor volumes that reached 2000 mm3 or displaying irreversible signs of disease were euthanized.

[0414] Results.

[0415] Subcutaneous tumor volumes of individual animals in each treatment group are presented in Tables 20-A-20-H.

[0416] No effect on tumor growth rates was observed in mice treated with the anti-CTLA4 antibody alone or with the IDO1 inhibitor alone. However, slower growth rates were observed in some of the animals treated with the rHER2 vaccine alone. Mice treated with the rHER2 vaccine in combination with the anti-CTLA4 antibody and mice treated with the rHER2 vaccine in combination with the IDO1 inhibitor had reduced tumor growth rates compared to the corresponding control animals. Tumor growth inhibition was most pronounced in mice treated with the rHER2 vaccine, the anti-CTLA4 antibody, and the IDO1 inhibitor.

TABLE 20-A
Subcutaneous tumor volumes from BALB-neuT mice treated with rHER2 vaccine, isotype control
antibody, and vehicle

| Study | Animal ID | | | | | | | | | | | | |
|---|---|---|---|---|---|---|---|---|---|---|---|---|---|
| Day | 001 | 002 | 003 | 004 | 005 | 006 | 007 | 008 | 009 | 010 | 011 | 012 | 013 |
| 7 | 15.28 | 24.88 | 25.22 | 43.22 | 20.92 | 23.31 | 54.61 | 18.97 | 15.63 | 7.26 | 34.97 | 23.85 | 26.51 |
| 11 | 59.85 | 51.25 | 32.16 | 70.17 | 53.95 | 33.47 | 58.64 | 27.65 | 23.43 | 24.93 | 52.01 | 30.46 | 64.37 |
| 14 | 69.49 | 58.15 | 44.48 | 92.14 | 77.00 | 48.03 | 94.39 | 35.07 | 28.64 | 28.73 | 95.93 | 60.86 | 76.06 |
| 18 | 121.53 | 105.11 | 69.57 | 162.26 | 147.15 | 89.85 | 200.97 | 64.56 | 54.34 | 48.57 | 268.43 | 62.34 | 99.72 |
| 21 | 177.93 | 109.81 | 78.17 | 182.61 | 145.82 | 106.58 | 194.34 | 63.14 | 71.46 | 88.39 | 254.23 | 83.27 | 137.39 |
| 24 | 209.82 | 89.80 | 80.60 | 186.71 | 130.91 | 120.51 | 309.21 | 70.57 | 101.02 | 90.27 | 340.71 | 80.33 | 151.06 |
| 27 | 251.78 | 178.06 | 145.48 | 172.65 | 203.23 | 132.37 | 304.55 | 129.14 | 107.72 | 127.13 | 324.79 | 113.27 | 147.59 |
| 32 | 288.46 | 299.49 | 182.91 | 299.93 | 228.06 | 119.13 | 357.37 | 132.57 | 171.17 | 155.00 | 466.10 | 139.30 | 163.84 |
| 35 | 442.65 | 518.22 | 233.63 | 307.12 | 283.16 | 209.64 | 434.25 | 208.03 | 213.44 | 233.02 | 481.62 | 260.75 | 261.80 |
| 39 | 419.12 | 503.33 | 442.52 | 345.36 | 355.59 | 231.06 | 432.68 | 318.63 | 315.93 | 286.47 | 572.77 | 298.59 | 303.23 |
| 42 | 379.48 | 513.54 | 449.02 | 340.25 | 362.51 | 254.14 | 487.55 | 294.58 | 349.26 | 379.28 | 626.35 | 286.86 | 319.48 |
| 46 | 601.65 | 778.43 | 637.73 | 453.39 | 899.49 | 292.45 | 519.25 | 294.40 | 531.22 | 342.83 | 642.31 | 445.75 | 300.56 |
| 49 | 525.83 | 682.34 | 768.94 | 337.45 | 594.31 | 291.11 | 632.67 | 388.48 | 639.75 | 491.05 | 631.72 | 408.40 | 308.73 |
| 53 | 618.09 | 893.01 | 932.23 | 391.25 | 576.25 | 280.96 | 657.04 | 503.44 | 829.63 | 456.57 | 606.13 | 491.55 | 447.34 |
| 56 | 793.23 | 1309.26 | 1085.82 | 411.50 | 412.62 | 350.51 | 750.48 | 685.26 | 1125.76 | 612.29 | 700.58 | 616.91 | 526.88 |
| 60 | 739.94 | 1422.57 | 1373.49 | 551.40 | 804.04 | 337.95 | 707.31 | 785.59 | 1195.66 | 563.75 | 843.39 | 638.94 | 693.70 |
| 63 | 741.90 | 1467.32 | 1450.32 | 446.17 | 1078.52 | 366.30 | 677.67 | 875.47 | 1369.64 | 687.52 | 845.94 | 700.93 | 563.40 |
| 66 | 866.83 | 1933.07 | 1695.44 | 407.94 | 1033.35 | 329.52 | 871.66 | 1274.41 | 1664.40 | 748.11 | 844.09 | 755.00 | 658.18 |
| 70 | 906.91 | | 2055.70 | 454.26 | 1128.39 | 377.46 | 857.93 | 1429.06 | 1902.09 | 899.02 | 977.86 | 1151.34 | 739.87 |
| 74 | 1050.44 | | | 510.24 | 1176.17 | 431.46 | 953.57 | 1316.47 | | 1008.84 | 1082.74 | 1132.80 | 737.69 |
| 77 | 1053.86 | | | 487.54 | 1454.97 | 504.43 | 974.43 | | | 1218.43 | 1062.30 | 1010.54 | 809.49 |
| 80 | 1195.52 | | | 560.59 | 1461.63 | 527.31 | 1298.82 | | | 1316.89 | 1165.74 | 1123.06 | |
| 83 | 1211.15 | | | 591.58 | 1883.74 | 529.70 | 1530.85 | | | 1405.59 | 1132.02 | 1269.96 | |
| 88 | 1999.58 | | | 680.13 | | 489.05 | 1515.67 | | | 1704.43 | 1117.78 | | |
| 91 | | | | 676.45 | | 468.02 | | | | 1731.76 | 1139.45 | | |
| 94 | | | | 742.06 | | 547.24 | | | | | 1340.71 | | |
| 98 | | | | 848.97 | | 778.30 | | | | | 1455.98 | | |
| 102 | | | | 878.51 | | 1299.14 | | | | | 1594.26 | | |
| 105 | | | | 941.87 | | 1052.06 | | | | | 1687.50 | | |
| 109 | | | | 1033.39 | | | | | | | 1954.73 | | |
| 112 | | | | | | | | | | | | | |
| 116 | | | | | | | | | | | | | |
| 119 | | | | | | | | | | | | | |
| 123 | | | | | | | | | | | | | |
| 130 | | | | | | | | | | | | | |

TABLE 20-B
Subcutaneous tumor volumes from BALB-neuT mice treated with rHER2 vaccine, anti-CTLA4
antibody, and vehicle

| Study | Animal ID | | | | | | | | | | | | |
|---|---|---|---|---|---|---|---|---|---|---|---|---|---|
| Day | 014 | 015 | 016 | 017 | 018 | 019 | 020 | 021 | 022 | 023 | 024 | 025 | 026 |
| 7 | 13.95 | 22.56 | 18.32 | 15.62 | 11.30 | 23.49 | 18.30 | 31.84 | 9.95 | 19.57 | 33.34 | 16.69 | 65.80 |
| 11 | 34.59 | 36.30 | 43.55 | 30.54 | 62.36 | 47.97 | 41.74 | 74.32 | 25.47 | 36.62 | 50.96 | 29.98 | 154.10 |
| 14 | 41.04 | 48.08 | 62.76 | 42.47 | 80.69 | 57.69 | 51.46 | 96.98 | 43.76 | 43.28 | 47.76 | 38.12 | 130.87 |
| 18 | 67.89 | 80.31 | 110.34 | 86.72 | 183.17 | 111.21 | 105.15 | 128.14 | 61.38 | 44.66 | 65.32 | 95.87 | 166.62 |
| 21 | 99.74 | 87.70 | 116.80 | 63.01 | 202.53 | 131.95 | 170.80 | 144.47 | 74.50 | 81.06 | 95.35 | 96.24 | 225.45 |
| 24 | 100.18 | 104.47 | 126.72 | 123.72 | 199.19 | 174.90 | 181.60 | 189.93 | 79.15 | 104.51 | 107.09 | 138.34 | 229.64 |
| 27 | 138.24 | 115.05 | 170.33 | 106.01 | 207.56 | 164.46 | 196.44 | 218.62 | 82.23 | 134.48 | 146.91 | 157.49 | 324.63 |
| 32 | 196.50 | 135.98 | 189.16 | 163.10 | 293.78 | 208.00 | 248.90 | 280.19 | 114.59 | 185.61 | 191.56 | 183.81 | 337.93 |
| 35 | 300.50 | 169.60 | 305.77 | 181.56 | 291.73 | 245.74 | 290.40 | 320.25 | 111.99 | 184.88 | 184.57 | 176.67 | 380.74 |
| 39 | 348.00 | 183.57 | 256.74 | 228.53 | 263.61 | 223.27 | 360.65 | 295.43 | 100.52 | 194.95 | 192.31 | 190.70 | 367.56 |
| 42 | 390.91 | 204.84 | 371.25 | 210.94 | 300.94 | 254.67 | 476.59 | 322.83 | 133.90 | 191.45 | 219.12 | 210.83 | 422.25 |
| 46 | 421.06 | 239.56 | 459.18 | 283.40 | 311.32 | 342.97 | 627.22 | 297.13 | 153.38 | 228.26 | 252.46 | 338.26 | 514.20 |
| 49 | 570.42 | 242.71 | 444.89 | 285.69 | 254.99 | 300.41 | 686.74 | 284.73 | 156.78 | 285.33 | 230.83 | 351.06 | 418.01 |
| 53 | 564.06 | 227.19 | 491.62 | 296.54 | 257.35 | 357.26 | 800.42 | 310.23 | 193.53 | 335.75 | 222.12 | 356.37 | 601.40 |
| 56 | 733.33 | 228.06 | 627.11 | 472.36 | 259.93 | 418.71 | 1013.00 | 302.14 | 219.62 | 383.69 | 241.56 | 449.13 | 609.87 |
| 60 | 897.14 | 267.39 | 607.90 | 517.19 | 312.72 | 420.79 | 1308.77 | 320.64 | 239.16 | 515.83 | 299.24 | 489.26 | 749.84 |
| 63 | 1057.26 | 268.83 | 660.87 | 445.35 | 316.86 | 483.64 | 1291.15 | 287.14 | 232.50 | 662.34 | 282.33 | 535.65 | 896.13 |
| 66 | 1300.92 | 322.12 | 896.63 | 481.50 | 348.28 | 488.58 | 1429.48 | 306.39 | 233.64 | 847.54 | 266.11 | 657.11 | 1007.19 |
| 70 | 1405.80 | 390.93 | 904.47 | 478.25 | 348.24 | 601.13 | 1420.89 | 382.32 | 315.81 | 804.92 | 268.72 | 760.97 | 977.72 |
| 74 | 1663.99 | 530.06 | 1051.68 | 520.03 | 404.21 | 658.56 | | 367.96 | 440.99 | 955.16 | 344.38 | 794.70 | 1421.67 |
| 77 | 1926.01 | 573.89 | 1219.67 | 601.49 | 470.28 | 749.73 | | 412.46 | 464.76 | 1194.80 | 329.63 | 901.75 | 1329.51 |
| 80 | | 739.80 | 1349.40 | 718.31 | 394.95 | 752.93 | | 420.98 | 495.99 | 1263.58 | 373.06 | 946.52 | 1232.01 |
| 83 | | 877.75 | 1653.19 | 910.62 | 466.02 | 820.70 | | 448.59 | 566.16 | 1553.21 | 438.83 | 942.35 | 1298.75 |
| 88 | | 954.88 | | 1265.55 | 846.03 | 937.01 | | 414.87 | 788.55 | 1916.96 | 495.65 | 1301.75 | 2002.26 |
| 91 | | 961.42 | | 1174.80 | 866.62 | 954.49 | | 491.20 | 846.32 | | 581.42 | 1283.15 | |
| 94 | | 1053.93 | | 1399.91 | 1002.14 | 1078.80 | | 408.20 | 933.39 | | 495.83 | 1539.79 | |
| 98 | | 1477.19 | | 1785.93 | 1094.65 | 1355.24 | | 480.75 | 1020.62 | | 695.49 | | |
| 102 | | 2005.53 | | 2455.90 | 1132.60 | 1506.85 | | 617.31 | 1196.80 | | 1049.34 | | |
| 105 | | | | | 1137.28 | 1646.70 | | 558.65 | 1519.06 | | 973.46 | | |
| 109 | | | | | 1629.53 | 2411.79 | | 567.21 | 1927.56 | | 1376.50 | | |
| 112 | | | | | 1610.74 | | | 659.07 | | | 1331.93 | | |
| 116 | | | | | 1903.32 | | | 736.53 | | | 2020.97 | | |
| 119 | | | | | | | | 843.09 | | | | | |
| 123 | | | | | | | | 812.58 | | | | | |
| 130 | | | | | | | | | | | | | |

TABLE 20-C
Subcutaneous tumor volumes from BALB-neuT mice treated with rHER2 vaccine, isotype monoclonal
antibody, and IDO1 inhibitor

| Study | Animal ID | | | | | | | | | | | | |
|---|---|---|---|---|---|---|---|---|---|---|---|---|---|
| Day | 027 | 028 | 029 | 030 | 031 | 032 | 033 | 034 | 035 | 036 | 037 | 038 | 039 |
| 7 | 22.57 | 18.54 | 24.25 | 23.74 | 62.87 | 47.26 | 26.06 | 19.89 | 10.02 | 28.07 | 9.21 | 19.87 | 26.44 |
| 11 | 27.87 | 26.90 | 25.69 | 35.75 | 109.91 | 55.24 | 54.27 | 30.68 | 16.48 | 75.34 | 18.47 | 66.24 | 42.82 |
| 14 | 32.46 | 29.47 | 31.95 | 40.32 | 144.26 | 47.57 | 54.29 | 58.07 | 25.83 | 92.84 | 31.83 | 58.95 | 71.17 |
| 18 | 37.10 | 57.13 | 44.48 | 94.60 | 278.87 | 90.96 | 63.91 | 74.80 | 44.97 | 129.98 | 43.36 | 94.67 | 123.44 |
| 21 | 50.62 | 96.30 | 64.33 | 124.60 | 392.48 | 143.92 | 101.50 | 73.61 | 71.45 | 153.08 | 63.58 | 123.83 | 111.42 |
| 24 | 55.76 | 109.72 | 75.91 | 174.47 | 438.38 | 161.19 | 115.11 | 79.60 | 109.91 | 174.26 | 64.08 | 93.15 | 128.18 |
| 27 | 55.49 | 118.93 | 95.32 | 178.96 | 542.65 | 202.58 | 154.54 | 105.80 | 127.26 | 195.71 | 79.97 | 106.00 | 144.12 |
| 32 | 113.02 | 157.60 | 160.49 | 235.16 | 717.70 | 252.81 | 233.30 | 127.84 | 188.83 | 260.21 | 93.05 | 177.97 | 137.99 |
| 35 | 92.45 | 185.58 | 176.42 | 257.51 | 786.70 | 368.98 | 292.35 | 142.96 | 309.08 | 262.68 | 119.74 | 194.95 | 127.66 |
| 39 | 128.29 | 276.68 | 279.74 | 333.07 | 937.96 | 457.17 | 284.18 | 216.33 | 363.62 | 340.70 | 113.68 | 234.56 | 162.13 |
| 42 | 200.60 | 308.88 | 309.27 | 411.98 | 1141.65 | 546.41 | 378.60 | 193.55 | 445.98 | 279.28 | 139.47 | 238.77 | 171.63 |
| 46 | 245.58 | 362.11 | 390.14 | 554.66 | 1129.43 | 699.15 | 522.13 | 211.14 | 579.92 | 446.04 | 163.31 | 271.10 | 171.35 |
| 49 | 185.53 | 407.07 | 389.34 | 678.29 | 1357.08 | 663.42 | 435.48 | 199.16 | 548.74 | 496.65 | 256.92 | 327.15 | 158.18 |
| 53 | 234.92 | 572.92 | 472.69 | 760.44 | 1657.89 | 764.79 | 576.68 | 195.14 | 749.50 | 403.22 | 271.69 | 340.39 | 179.89 |
| 56 | 315.08 | 654.90 | 527.02 | 970.81 | 1830.37 | 918.21 | 811.53 | 215.44 | 1080.73 | 535.72 | 398.94 | 394.64 | 240.12 |
| 60 | 358.46 | 802.56 | 733.00 | 1126.99 | 2337.11 | 943.99 | 973.45 | 235.27 | 1169.89 | 727.24 | 431.20 | 437.25 | 219.66 |
| 63 | 329.23 | 988.22 | 686.07 | 1326.18 | | 1114.22 | 1180.40 | 205.89 | 1491.79 | 749.53 | 706.03 | 443.52 | 228.26 |
| 66 | 419.20 | 1116.22 | 720.64 | 1550.51 | | 1367.74 | 2093.28 | 183.53 | 1747.57 | 1500.11 | 948.51 | 536.57 | 249.72 |
| 70 | 474.17 | 1374.23 | 967.99 | 1760.87 | | | | 227.05 | | 1478.26 | 1065.41 | 623.91 | 248.73 |
| 74 | 624.62 | 1772.89 | 1197.73 | 2006.03 | | | | 233.91 | | 1494.91 | 1316.37 | 622.88 | 374.49 |
| 77 | 647.51 | 1989.96 | 1262.15 | | | | | 253.71 | | 1990.94 | 1897.98 | 714.20 | 486.35 |
| 80 | | | 1539.37 | | | | | 247.06 | | | | 746.30 | 361.49 |
| 83 | | | 2002.66 | | | | | 221.28 | | | | 947.06 | 470.06 |
| 88 | | | | | | | | 302.35 | | | | 1049.34 | 607.71 |
| 91 | | | | | | | | 283.62 | | | | 1094.29 | 584.53 |
| 94 | | | | | | | | 240.95 | | | | 1223.56 | 707.49 |
| 98 | | | | | | | | 267.69 | | | | 1157.88 | 819.76 |
| 102 | | | | | | | | 332.05 | | | | 1588.42 | 1166.09 |
| 105 | | | | | | | | | | | | | |
| 109 | | | | | | | | | | | | | |
| 112 | | | | | | | | | | | | | |
| 116 | | | | | | | | | | | | | |
| 119 | | | | | | | | | | | | | |
| 123 | | | | | | | | | | | | | |
| 130 | | | | | | | | | | | | | |

TABLE 20-D
Subcutaneous tumor volumes from BALB-neuT mice treated with rHER2 vaccine, anti-CTLA4 antibody,
and IDO1 inhibitor

| Study | Animal ID | | | | | | | | | | | | |
|---|---|---|---|---|---|---|---|---|---|---|---|---|---|
| Day | 040 | 041 | 042 | 043 | 044 | 045 | 046 | 047 | 048 | 049 | 050 | 051 | 052 |
| 7 | 54.10 | 39.35 | 23.64 | 21.18 | 12.84 | 21.67 | 20.25 | 19.96 | 25.33 | 36.98 | 36.19 | 31.76 | 23.13 |
| 11 | 44.01 | 62.51 | 25.95 | 22.00 | 20.61 | 29.61 | 22.93 | 31.30 | 54.95 | 60.31 | 40.28 | 64.26 | 35.48 |
| 14 | 82.71 | 61.84 | 44.03 | 41.17 | 27.61 | 39.84 | 31.52 | 50.27 | 53.59 | 167.13 | 39.13 | 71.77 | 46.37 |
| 18 | 109.42 | 104.01 | 70.45 | 47.24 | 39.37 | 43.45 | 46.45 | 64.50 | 96.05 | 118.82 | 86.60 | 117.11 | 52.67 |
| 21 | 156.97 | 122.98 | 122.03 | 88.69 | 39.10 | 79.80 | 74.00 | 59.76 | 126.21 | 150.23 | 67.16 | 106.50 | 64.01 |
| 24 | 161.80 | 181.51 | 136.55 | 66.17 | 83.81 | 80.21 | 101.01 | 78.26 | 212.63 | 154.56 | 83.75 | 155.85 | 83.60 |
| 27 | 193.79 | 191.62 | 257.40 | 93.98 | 102.01 | 129.31 | 84.05 | 104.26 | 160.51 | 139.11 | 77.42 | 167.41 | 92.72 |
| 32 | 243.54 | 263.07 | 273.35 | 158.04 | 101.16 | 150.00 | 98.57 | 156.07 | 255.04 | 162.11 | 101.56 | 203.30 | 114.82 |
| 35 | 312.75 | 361.78 | 504.87 | 164.62 | 144.05 | 120.50 | 122.05 | 142.97 | 316.54 | 172.90 | 114.17 | 218.18 | 132.22 |
| 39 | 396.82 | 323.31 | 582.32 | 242.63 | 157.89 | 232.03 | 95.33 | 154.30 | 425.09 | 257.83 | 149.53 | 267.35 | 168.35 |
| 42 | 413.28 | 367.59 | 663.21 | 254.92 | 250.62 | 281.01 | 169.40 | 159.04 | 427.33 | 259.24 | 151.88 | 259.86 | 147.14 |
| 46 | 442.03 | 400.06 | 833.78 | 245.54 | 247.14 | 265.42 | 196.92 | 188.31 | 582.82 | 304.99 | 146.35 | 227.25 | 171.42 |
| 49 | 499.68 | 458.65 | 692.49 | 269.68 | 303.80 | 298.85 | 239.11 | 199.54 | 582.63 | 363.70 | 147.05 | 184.65 | 192.15 |
| 53 | 602.85 | 388.55 | 832.63 | 319.74 | 338.88 | 350.68 | 147.19 | 189.14 | 683.19 | 425.27 | 141.44 | 180.96 | 175.06 |
| 56 | 678.49 | 583.14 | 1172.40 | 313.88 | 375.36 | 490.44 | 121.54 | 250.75 | 1015.63 | 421.92 | 193.75 | 223.80 | 167.34 |
| 60 | 716.23 | 566.05 | 1993.58 | 297.92 | 405.37 | 488.16 | 168.02 | 276.09 | 1016.18 | 568.77 | 192.25 | 253.13 | 176.65 |
| 63 | 763.88 | 694.35 | | 360.21 | 477.42 | 576.05 | 214.59 | 394.42 | 1118.06 | 623.54 | 160.79 | 259.78 | 142.51 |
| 66 | 903.52 | 896.37 | | 398.70 | 639.62 | 743.61 | 272.91 | 395.65 | 1444.51 | | 200.21 | 264.16 | 219.92 |
| 70 | 1067.20 | 981.05 | | 432.21 | 590.19 | 768.14 | 239.03 | 427.52 | 1594.41 | | 193.97 | 320.82 | 183.68 |
| 74 | 991.59 | 1190.31 | | 573.68 | 743.70 | 903.33 | 222.29 | 428.53 | 1656.59 | | 188.48 | 308.71 | 167.55 |
| 77 | 1018.46 | 1567.97 | | 556.19 | 716.08 | 967.81 | 309.27 | 484.64 | 1917.82 | | 194.87 | 253.57 | 162.01 |
| 80 | 1195.74 | 1390.97 | | 574.12 | | 1102.62 | 277.63 | 627.19 | | | 261.80 | 367.28 | 201.87 |
| 83 | 1331.93 | 1884.11 | | 579.14 | | 1695.16 | 256.90 | 690.39 | | | 292.88 | 325.23 | 199.87 |
| 88 | | | | 772.39 | | 1995.92 | 276.57 | 645.27 | | | 363.61 | 379.12 | 210.81 |
| 91 | | | | 751.29 | | | 320.68 | 626.20 | | | 350.28 | 428.39 | 224.19 |
| 94 | | | | 1288.49 | | | 335.59 | 627.27 | | | 402.96 | 462.28 | 238.84 |
| 98 | | | | 1164.73 | | | 337.65 | 830.60 | | | 438.33 | 581.69 | 298.47 |
| 102 | | | | 1324.12 | | | 409.66 | 1014.27 | | | 505.42 | 602.90 | 427.80 |
| 105 | | | | 1202.44 | | | 467.05 | 1140.43 | | | 521.30 | 712.86 | 411.28 |
| 109 | | | | 2079.90 | | | 483.78 | 1218.84 | | | 757.14 | 707.01 | 544.77 |
| 112 | | | | | | | 579.36 | 1346.57 | | | 607.66 | 873.67 | 598.32 |
| 116 | | | | | | | 814.25 | 1570.94 | | | 721.33 | 1148.33 | 658.27 |
| 119 | | | | | | | 782.56 | 1999.79 | | | 784.41 | 1318.46 | 601.06 |
| 123 | | | | | | | 661.23 | | | | 664.85 | 1320.43 | 626.48 |
| 130 | | | | | | | 1027.75 | | | | 883.59 | 1979.35 | 671.05 |

TABLE 20-E
Subcutaneous tumor volumes from BALB-neuT mice treated with control vaccine, isotype monoclonal
antibody, and vehicle

| Study | Animal ID | | | | | | | | | | | | |
|---|---|---|---|---|---|---|---|---|---|---|---|---|---|
| Day | 053 | 054 | 055 | 056 | 057 | 058 | 059 | 060 | 061 | 062 | 063 | 064 | 065 |
| 7 | 15.08 | 18.70 | 72.45 | 17.86 | 31.00 | 18.49 | 33.40 | 29.51 | 67.11 | 24.58 | 10.81 | 23.92 | 19.49 |
| 11 | 58.60 | 54.25 | 123.35 | 30.28 | 58.33 | 33.39 | 50.68 | 123.50 | 101.88 | 40.82 | 37.88 | 46.17 | 54.79 |
| 14 | 66.13 | 57.25 | 141.53 | 59.92 | 51.27 | 38.54 | 69.03 | 149.25 | 115.84 | 59.04 | 60.55 | 47.41 | 60.04 |
| 18 | 100.35 | 127.83 | 169.74 | 108.08 | 98.62 | 74.59 | 93.79 | 221.58 | 216.32 | 66.67 | 150.77 | 88.44 | 96.81 |
| 21 | 104.51 | 155.77 | 207.70 | 135.72 | 129.89 | 107.63 | 104.90 | 323.75 | 280.31 | 81.26 | 154.01 | 106.39 | 153.56 |
| 24 | 164.46 | 178.17 | 273.86 | 194.10 | 166.70 | 130.99 | 108.08 | 428.86 | 388.16 | 121.42 | 204.26 | 240.02 | 179.89 |
| 27 | 173.12 | 266.11 | 433.12 | 274.20 | 221.81 | 175.65 | 208.91 | 501.03 | 393.66 | 143.97 | 228.35 | 196.57 | 262.10 |
| 32 | 240.12 | 374.31 | 702.18 | 390.43 | 326.57 | 241.87 | 243.68 | 603.91 | 567.21 | 223.65 | 309.24 | 290.32 | 450.62 |
| 35 | 372.09 | 483.08 | 708.07 | 543.61 | 542.74 | 318.46 | 343.70 | 890.20 | 705.62 | 251.46 | 424.33 | 286.92 | 397.85 |
| 39 | 455.22 | 657.38 | 939.28 | 588.96 | 567.05 | 467.47 | 473.88 | 956.11 | 993.67 | 395.46 | 526.97 | 308.71 | 620.57 |
| 42 | 585.12 | 765.03 | 1120.45 | 666.99 | 688.37 | 555.97 | 607.03 | 951.75 | 1173.89 | 463.83 | 672.59 | 469.69 | 773.08 |
| 46 | 791.60 | 1105.75 | 1323.69 | 1128.15 | 1155.17 | 702.22 | 789.24 | 1616.22 | 1451.45 | 639.83 | 934.86 | 479.77 | 927.62 |
| 49 | 1097.81 | 1189.35 | 2028.49 | 1236.32 | 1244.71 | 1014.51 | 1016.09 | 1914.25 | 2034.67 | 749.54 | 1173.78 | 707.56 | 1212.93 |
| 53 | 1363.43 | 1631.61 | | 1657.80 | 1743.67 | 1081.25 | 1316.46 | | | 1274.45 | 1667.48 | 790.81 | 1474.56 |
| 56 | 1483.62 | 1904.26 | | 1771.67 | 1688.79 | 1183.68 | 1311.02 | | | 1098.40 | 1953.44 | 960.80 | 1659.31 |
| 60 | 1901.83 | | | 2068.50 | 2061.22 | 1286.21 | 2034.92 | | | 1705.47 | | 1061.59 | 1779.08 |
| 63 | | | | | | 1517.04 | | | | 1642.50 | | 1308.21 | |
| 66 | | | | | | 1902.74 | | | | 1940.74 | | 1450.05 | |
| 70 | | | | | | | | | | | | | |
| 74 | | | | | | | | | | | | | |
| 77 | | | | | | | | | | | | | |
| 80 | | | | | | | | | | | | | |
| 83 | | | | | | | | | | | | | |
| 88 | | | | | | | | | | | | | |
| 91 | | | | | | | | | | | | | |
| 94 | | | | | | | | | | | | | |
| 98 | | | | | | | | | | | | | |
| 102 | | | | | | | | | | | | | |
| 105 | | | | | | | | | | | | | |
| 109 | | | | | | | | | | | | | |
| 112 | | | | | | | | | | | | | |
| 116 | | | | | | | | | | | | | |
| 119 | | | | | | | | | | | | | |
| 123 | | | | | | | | | | | | | |
| 130 | | | | | | | | | | | | | |

TABLE 20-F
Subcutaneous tumor volumes from BALB-neuT mice treated with control vaccine, anti-CTLA4 antibody, and
vehicle

| Study | Animal ID | | | | | | | | | | | | |
|---|---|---|---|---|---|---|---|---|---|---|---|---|---|
| Day | 066 | 067 | 068 | 069 | 070 | 071 | 072 | 073 | 074 | 075 | 076 | 077 | 078 |
| 7 | 31.57 | 16.81 | 19.84 | 26.53 | 31.95 | 45.30 | 30.22 | 15.04 | 28.27 | 24.27 | 18.27 | 23.86 | 26.78 |
| 11 | 65.01 | 42.45 | 77.71 | 42.97 | 36.94 | 69.07 | 53.78 | 18.79 | 28.90 | 60.85 | 35.20 | 33.73 | 35.30 |
| 14 | 67.75 | 52.64 | 58.52 | 59.81 | 51.64 | 133.54 | 50.06 | 18.81 | 54.38 | 56.90 | 38.19 | 43.61 | 42.69 |
| 18 | 107.43 | 80.43 | 24.77 | 75.41 | 120.27 | 138.58 | 113.91 | 32.23 | 72.21 | 86.65 | 63.99 | 61.86 | 79.41 |
| 21 | 108.33 | 122.66 | 58.44 | 99.93 | 115.49 | 169.67 | 108.74 | 33.66 | 68.85 | 81.49 | 66.19 | 88.88 | 92.80 |
| 24 | 135.87 | 142.73 | 205.72 | 138.58 | 195.34 | 245.58 | 199.84 | 38.82 | 78.26 | 111.41 | 115.74 | 81.24 | 114.15 |
| 27 | 202.52 | 136.92 | 233.44 | 218.55 | 257.60 | 249.39 | 215.05 | 76.57 | 102.07 | 177.24 | 146.52 | 118.63 | 158.62 |
| 32 | 265.16 | 246.28 | 392.99 | 523.97 | 289.01 | 453.52 | 389.26 | 119.16 | 173.75 | 215.29 | 168.01 | 195.78 | 237.85 |
| 35 | 268.11 | 307.75 | 523.86 | 498.69 | 338.58 | 411.31 | 536.87 | 158.61 | 254.89 | 319.28 | 282.80 | 305.00 | 330.57 |
| 39 | 409.74 | 488.72 | 621.93 | 678.35 | 518.57 | 665.59 | 568.49 | 234.62 | 508.87 | 394.05 | 315.21 | 347.86 | 518.94 |
| 42 | 497.76 | 579.50 | 613.71 | 650.46 | 604.07 | 786.51 | 635.44 | 267.01 | 515.71 | 498.47 | 474.74 | 425.11 | 661.10 |
| 46 | 568.07 | 779.30 | 807.17 | 846.95 | 842.44 | 866.45 | 856.31 | 300.02 | 602.44 | 740.77 | 583.16 | 507.16 | 874.70 |
| 49 | 870.94 | 998.56 | 1070.92 | 1642.07 | 1027.26 | 1066.57 | 957.73 | 354.92 | 833.74 | 770.76 | 792.40 | 839.43 | 1103.46 |
| 53 | 924.06 | 1547.25 | 1372.06 | 2026.49 | 1295.16 | 1430.84 | 1522.16 | 498.99 | 1122.50 | 971.82 | 967.85 | 1050.27 | 1374.42 |
| 56 | 1119.84 | 1615.70 | 1971.09 | | 1602.07 | | 1567.94 | 598.49 | 1087.10 | 1101.63 | 1179.51 | 1148.98 | 1930.34 |
| 60 | 1734.81 | 2275.56 | | | 1953.31 | | 2130.99 | 821.52 | 1460.04 | 1371.70 | 1568.95 | 1543.35 | |
| 63 | 2187.87 | | | | | | | 881.14 | | 1613.94 | 1944.88 | 1672.95 | |
| 66 | | | | | | | | 1097.85 | | 2080.38 | | 2213.55 | |
| 70 | | | | | | | | 1476.50 | | | | | |
| 74 | | | | | | | | 1925.13 | | | | | |
| 77 | | | | | | | | | | | | | |
| 80 | | | | | | | | | | | | | |
| 83 | | | | | | | | | | | | | |
| 88 | | | | | | | | | | | | | |
| 91 | | | | | | | | | | | | | |
| 94 | | | | | | | | | | | | | |
| 98 | | | | | | | | | | | | | |
| 102 | | | | | | | | | | | | | |
| 105 | | | | | | | | | | | | | |
| 109 | | | | | | | | | | | | | |
| 112 | | | | | | | | | | | | | |
| 116 | | | | | | | | | | | | | |
| 119 | | | | | | | | | | | | | |
| 123 | | | | | | | | | | | | | |
| 130 | | | | | | | | | | | | | |

TABLE 20-G
Subcutaneous tumor volumes from BALB-neuT mice treated with control vaccine, isotype control monoclonal
antibody, and IDO1 inhibitor

| Study | Animal ID | | | | | | | | | | | | |
|---|---|---|---|---|---|---|---|---|---|---|---|---|---|
| Day | 079 | 080 | 081 | 082 | 083 | 084 | 085 | 086 | 087 | 088 | 089 | 090 | 091 |
| 7 | 27.80 | 36.46 | 21.11 | 15.78 | 34.61 | 12.22 | 14.78 | 20.72 | 28.62 | 21.87 | 32.40 | 18.45 | 21.99 |
| 11 | 50.27 | 46.02 | 29.32 | 42.34 | 66.59 | 21.18 | 19.13 | 51.22 | 33.59 | 28.63 | 52.20 | 24.65 | 50.36 |
| 14 | 66.16 | 39.75 | 31.22 | 43.83 | 99.08 | 27.42 | 36.76 | 53.21 | 62.59 | 35.08 | 54.92 | 44.31 | 85.94 |
| 18 | 87.17 | 73.84 | 62.25 | 84.25 | 115.90 | 47.77 | 40.28 | 81.38 | 130.43 | 43.33 | 77.07 | 67.44 | 136.82 |
| 21 | 91.03 | 75.81 | 78.22 | 89.04 | 182.85 | 58.23 | 54.88 | 135.90 | 127.97 | 64.93 | 113.76 | 113.10 | 163.91 |
| 24 | 161.46 | 100.08 | 101.79 | 140.26 | 284.27 | 88.35 | 55.22 | 110.30 | 155.81 | 92.35 | 169.45 | 127.09 | 198.49 |
| 27 | 163.11 | 125.82 | 123.19 | 186.49 | 361.01 | 112.48 | 80.13 | 147.33 | 241.15 | 110.42 | 171.37 | 129.44 | 240.05 |
| 32 | 252.04 | 251.57 | 194.14 | 275.98 | 541.91 | 153.38 | 110.90 | 184.76 | 321.37 | 173.28 | 301.94 | 202.21 | 337.79 |
| 35 | 324.53 | 262.56 | 246.60 | 364.82 | 598.92 | 209.97 | 141.15 | 244.33 | 521.30 | 260.28 | 306.58 | 377.96 | 401.70 |
| 39 | 414.72 | 434.13 | 389.39 | 471.60 | 671.98 | 338.06 | 192.15 | 328.32 | 572.30 | 343.13 | 512.15 | 430.30 | 596.09 |
| 42 | 603.00 | 551.64 | 463.99 | 601.50 | 820.44 | 340.52 | 268.88 | 441.62 | 676.89 | 408.33 | 574.86 | 574.25 | 680.54 |
| 46 | 660.63 | 696.77 | 782.22 | 933.81 | 997.91 | 431.11 | 345.63 | 682.81 | 1060.91 | 604.23 | 818.67 | 719.57 | 909.66 |
| 49 | 685.30 | 917.68 | 1138.52 | 1124.52 | 1219.32 | 609.28 | 470.15 | 807.07 | 1164.50 | 629.55 | 940.30 | 942.51 | 1045.76 |
| 53 | 864.42 | 1073.56 | 1288.73 | 1449.44 | 1275.84 | 735.98 | 547.89 | 1167.81 | 1618.54 | 792.50 | 1373.25 | 1139.13 | 1614.31 |
| 56 | 943.28 | 1323.69 | 1631.81 | 1937.45 | 2064.17 | 952.77 | 893.91 | 1714.64 | 1754.98 | 1128.21 | 1630.88 | 1431.28 | 1471.68 |
| 60 | 1384.35 | 1653.35 | 1673.55 | | | 1107.86 | 928.10 | 1923.35 | 1918.84 | 1450.47 | | 1946.29 | |
| 63 | 1600.66 | 2089.13 | 1682.01 | | | 1426.67 | 938.92 | | | 1652.48 | | | |
| 66 | 1776.61 | | 1982.89 | | | 1416.50 | 1198.20 | | | 1985.40 | | | |
| 70 | 2186.37 | | | | | 1974.53 | 1804.46 | | | | | | |
| 74 | | | | | | | 1816.96 | | | | | | |
| 77 | | | | | | | 2039.55 | | | | | | |
| 80 | | | | | | | | | | | | | |
| 83 | | | | | | | | | | | | | |
| 88 | | | | | | | | | | | | | |
| 91 | | | | | | | | | | | | | |
| 94 | | | | | | | | | | | | | |
| 98 | | | | | | | | | | | | | |
| 102 | | | | | | | | | | | | | |
| 105 | | | | | | | | | | | | | |
| 109 | | | | | | | | | | | | | |
| 112 | | | | | | | | | | | | | |
| 116 | | | | | | | | | | | | | |
| 119 | | | | | | | | | | | | | |
| 123 | | | | | | | | | | | | | |
| 130 | | | | | | | | | | | | | |

TABLE 20-H
Subcutaneous tumor volumes from BALB-neuT mice treated with control vaccine, anti-CTLA4 antibody,
and IDO1 inhibitor

| Study | Animal ID | | | | | | | | | | | | |
|---|---|---|---|---|---|---|---|---|---|---|---|---|---|
| Day | 092 | 093 | 094 | 095 | 096 | 097 | 098 | 099 | 100 | 101 | 102 | 103 | 104 |
| 7 | 23.50 | 79.61 | 37.58 | 33.69 | 19.24 | 51.28 | 54.39 | 19.99 | 17.96 | 31.15 | 41.65 | 32.98 | 14.52 |
| 11 | 45.95 | 175.07 | 60.28 | 42.51 | 34.51 | 127.99 | 62.57 | 55.07 | 51.65 | 88.69 | 90.89 | 44.64 | 17.86 |
| 14 | 63.89 | 163.67 | 77.18 | 67.42 | 37.76 | 116.30 | 79.39 | 64.35 | 48.63 | 82.68 | 82.10 | 61.33 | 31.37 |
| 18 | 97.30 | 243.40 | 197.71 | 102.33 | 112.32 | 153.27 | 92.24 | 113.19 | 68.81 | 140.37 | 217.09 | 87.60 | 42.00 |
| 21 | 160.23 | 249.28 | 155.64 | 109.24 | 159.77 | 171.07 | 124.87 | 141.01 | 104.12 | 184.89 | 223.66 | 124.77 | 52.28 |
| 24 | 214.44 | 358.20 | 178.52 | 146.05 | 155.75 | 189.29 | 160.00 | 185.05 | 133.44 | 222.78 | 308.93 | 149.93 | 65.39 |
| 27 | 240.41 | 415.24 | 198.00 | 191.28 | 267.39 | 298.20 | 231.41 | 157.93 | 191.15 | 238.17 | 416.37 | 211.67 | 87.13 |
| 32 | 513.57 | 601.62 | 385.73 | 344.44 | 444.06 | 376.94 | 324.54 | 244.96 | 328.38 | 365.22 | 635.31 | 358.92 | 99.41 |
| 35 | 616.99 | 692.22 | 389.96 | 455.32 | 417.99 | 484.35 | 441.24 | 264.56 | 333.93 | 437.71 | 813.28 | 385.04 | 177.23 |
| 39 | 715.16 | 1023.24 | 500.83 | 638.78 | 601.10 | 775.30 | 639.05 | 308.73 | 509.92 | 543.97 | 905.65 | 530.66 | 235.25 |
| 42 | 717.28 | 1165.74 | 503.20 | 815.34 | 596.80 | 798.96 | 795.51 | 361.27 | 438.96 | 638.64 | 1106.64 | 673.19 | 239.49 |
| 46 | 1123.80 | 1329.85 | 768.11 | 1034.27 | 895.57 | 1266.07 | 1001.88 | 500.68 | 781.21 | 813.68 | 1270.88 | 827.87 | 352.48 |
| 49 | 1401.34 | 1734.62 | 1016.27 | 1222.00 | 945.71 | 1346.31 | 1044.92 | 712.92 | 1214.73 | 954.08 | 1780.32 | 843.85 | 571.40 |
| 53 | 1589.06 | 2021.70 | 1176.32 | 1559.52 | 1296.01 | 1620.80 | 1558.21 | 958.70 | 1154.16 | | 2036.34 | 931.60 | 673.63 |
| 56 | 2311.25 | | 1343.46 | 1818.39 | 1465.17 | 2067.77 | 1760.94 | 1195.69 | 1541.24 | | | 1296.52 | 901.88 |
| 60 | | | 1631.83 | 2068.78 | 1667.99 | | 1626.18 | 1630.40 | 1783.77 | | | 1468.55 | 1185.11 |
| 63 | | | 1969.65 | | 1571.44 | | | 1651.73 | 2028.86 | | | 1737.96 | 1296.69 |
| 66 | | | | | | | | 1927.56 | | | | | 1929.80 |
| 70 | | | | | | | | | | | | | |
| 74 | | | | | | | | | | | | | |
| 77 | | | | | | | | | | | | | |
| 80 | | | | | | | | | | | | | |
| 83 | | | | | | | | | | | | | |
| 88 | | | | | | | | | | | | | |
| 91 | | | | | | | | | | | | | |
| 94 | | | | | | | | | | | | | |
| 98 | | | | | | | | | | | | | |
| 102 | | | | | | | | | | | | | |
| 105 | | | | | | | | | | | | | |
| 109 | | | | | | | | | | | | | |
| 112 | | | | | | | | | | | | | |
| 116 | | | | | | | | | | | | | |
| 119 | | | | | | | | | | | | | |
| 123 | | | | | | | | | | | | | |
| 130 | | | | | | | | | | | | | |

RAW SEQUENCE LISTING

SEQ ID NO: 1-MUC1 Isoform 1 protein (Reference Polypeptide; Uniprot P15941-1)
(human)
MTPGTQSPFFLLLLLTVLTVVTGSGHASSTPGGEKETSATQRSSVPSSTEKNAVSMTS
SVLSSHSPGSGSSTTQGQDVTLAPATEPASGSAATWGQDVTSVPVTRPALGSTTPPA
HDVTSAPDNKPAPGSTAPPAHGVTSAPDTRPAPGSTAPPAHGVTSAPDTRPAPGSTA
PPAHGVTSAPDTRPAPGSTAPPAHGVTSAPDTRPAPGSTAPPAHGVTSAPDTRPAPG
STAPPAHGVTSAPDTRPAPGSTAPPAHGVTSAPDTRPAPGSTAPPAHGVTSAPDTRP
APGSTAPPAHGVTSAPDTRPAPGSTAPPAHGVTSAPDTRPAPGSTAPPAHGVTSAPD
TRPAPGSTAPPAHGVTSAPDTRPAPGSTAPPAHGVTSAPDTRPAPGSTAPPAHGVTS
APDTRPAPGSTAPPAHGVTSAPDTRPAPGSTAPPAHGVTSAPDTRPAPGSTAPPANG
VTSAPDTRPAPGSTAPPAHGVTSAPDTRPAPGSTAPPAHGVTSAPDTRPAPGSTAPP
AHGVTSAPDTRPAPGSTAPPAHGVTSAPDTRPAPGSTAPPAHGVTSAPDTRPAPGST
APPAHGVTSAPDTRPAPGSTAPPAHGVTSAPDTRPAPGSTAPPAHGVTSAPDTRPAP
GSTAPPAHGVTSAPDTRPAPGSTAPPAHGVTSAPDTRPAPGSTAPPAHGVTSAPDTR
PAPGSTAPPAHGVTSAPDTRPAPGSTAPPAHGVTSAPDTRPAPGSTAPPAHGVTSAP
DTRPAPGSTAPPAHGVTSAPDTRPAPGSTAPPAHGVTSAPDTRPAPGSTAPPAHGVT
SAPDTRPAPGSTAPPAHGVTSAPDTRPAPGSTAPPAHGVTSAPDTRPAPGSTAPPAH
GVTSAPDTRPAPGSTAPPAHGVTSAPDTRPAPGSTAPPAHGVTSAPDTRPAPGSTAP
PAHGVTSAPDTRPAPGSTAPPAHGVTSAPDNRPALGSTAPPVHNVTSASGSASGSAS
TLVHNGTSARATTTPASKSTPFSIPSHHSDTPTTLASHSTKTDASSTHHSSVPPLTSSN
HSTSPQLSTGVSFFFLSFHISNLQFNSSLEDPSTDYYQELQRDISEMFLQIYKQGGFLGL
SNIKFRPGSVWQLTLAFREGTINVHDVETQFNQYKTEAASRYNLTISDVSVSDVPFPFS
AQSGAGVPGWGIALLVLVCVLVALAIVYLIALAVCQCRRKNYGQLDIFPARDTYHPMSE
YPTYHTHGRYVPPSSTDRSPYEKVSAGNGGSSLSYTNPAVAATSANL
SEQ ID NO: 2-Mesothelin Isoform 2 precursor protein (Reference Polypeptide;
Uniprot Q13421-3) (human)
MALPTARPLLGSCGTPALGSLLFLLFSLGVVVQPSRTLAGETGQEAAPLDGVLANPPNIS
SLSPRQLLGFPCAEVSGLSTERVRELAVALAQKNVKLSTEQLRCLAHRLSEPPEDLDAL
PLDLLLFLNPDAFSGPQACTRFFSRITKANVDLLPRGAPERQRLLPAALACWGVRGSLL
SEADVRALGGLACDLPGRFVAESAEVLLPRLVSCPGPLDQDQQEAARAALQGGGPPY
GPPSTWSVSTMDALRGLLPVLGQPIIRSIPQGIVAAWRQRSSRDPSWRQPERTILRPRF
RREVEKTACPSGKKARElDESLIFYKKWELEACVDAALLATQMDRVNAIPFTYEQLDVL
KHKLDELYPQGYPESVIQHLGYLFLKMSPEDIRKWNVTSLETLKALLEVNKGHEMSPQ
VATLIDRFVKGRGQLDKDTLDTLTAFYPGYLCSLSPEELSSVPPSSIWAVRPQDLDTCD
PRQLDVLYPKARLAFQNMNGSEYFVKIQSFLGGAPTEDLKALSQQNVSMDLATFMKLR
TDAVLPLTVAEVQKLLGPHVEGLKAEERHRPVRDWILRQRQDDLDTLGLGLQGGIPNG
YLVLDLSMQEALSGTPCLLGPGPVLTVLALLLASTLA
SEQ ID NO: 3-TERT Isoform 1 protein (Reference Polypeptide; Genbank
AAD30037, Uniprot O14746-1)(human)
MPRAPRCRAVRSLLRSHYREVLPLATFVRRLGPQGWRLVQRGDPAAFRALVAQCLVC
VPWDARPPPAAPSFRQVSCLKELVARVLQRLCERGAKNVLAFGFALLDGARGGPPEA
FTTSVRSYLPNTVTDALRGSGAWGLLLRRVGDDVLVHLLARCALFVLVAPSCAYQVCG
PPLYQLGAATQARPPPHASGPRRRLGCERAWNHSVREAGVPLGLPAPGARRRGGSA
SRSLPLPKRPRRGAAPEPERTPVGQGSWAHPGRTRGPSDRGFCWSPARPAEEATS
LEGALSGTRHSHPSVGRQHHAGPPSTSRPPRPWDTPCPPVYAETKHFLYSSGDKEQL
RPSFLLSSLRPSLTGARRLVETIFLGSRPWMPGTPRRLPRLPQRYWQMRPLFLELLGN
HAQCPYGVLLKTHCPLRAAVTPAAGVCAREKPQGSVAAPEEEDTDPRRLVQLLRQHS
SPWQVYGFVRACLRRLVPPGLWGSRHNERRFLRNTKKFISLGKHAKLSLQELTWKMS
VRDCAWLRRSPGVGCVPAAEHRLREElLAKFLHWLMSVYVVELLRSFFYVTETTFQKN
RLFFYRKSVVVSKLQSIGIRQHLKRVQLRELSEAEVRQHREARPALLTSRLRFlPKPDGL
RPIVNMDYVVGARTFRREKRAERLTSRVKALFSVLNYERARRPGLLGASVLGLDDIHR
AWRTFVLRVRAQDPPPELYFVKVDVTGAYDTIPQDRLTEVIASIIKPQNTYCVRRYAW
QKAAHGHVRKAFKSHVSTLTDLQPYMRQFVAHLQETSPLRDAVVIEQSSSLNEASSGL
FDVFLRFMCHHAVRIRGKSYVQCQGIPQGSILSTLLCSLCYGDMENKLFAGIRRDGLLL
RLVDDFLLVTPHLTHAKTFLRTLVRGVPEYGCVVNLRKTVVNFPVEDEALGGTAFVQM
PAHGLFPWCGLLLDTRTLEVQSDYSSYARTSIRASLTFNRGFKAGRNMRRKLFGVLRL
KCHSLFLDLQVNSLQTVCTNIYKILLLQAYRFHACVLQLPFHQQVWKNPTFFLRVISDTA
SLCYSILKAKNAGMSLGAKGAAGPLPSEAVQWLCHQAFLLKLTRHRVTYVPLLGSLRT
AQTQLSRKLPGTTLTALEAAANPALPSDFKTILD
SEQ ID NO: 4-AdC68Y Empty
ccatcttcaataatatacctcaaactttttgtgcgcgttaatatgcaaatgaggcgtttgaatttggggaggaagggcggtgatt
ggtcgagggatgagcgaccgttaggggcggggcgagtgacgttttgatgacgtggttgcgaggaggagccagtttgcaa
gttctcgtgggaaaagtgacgtcaaacgaggtgtggtttgaacacggaaatactcaattttcccgcgctctctgacaggaaa
tgaggtgtttctgggcggatgcaagtgaaaacgggccattttcgcgcgaaaactgaatgaggaagtgaaaatctgagtaa
tttcgcgtttatggcagggaggagtatttgccgagggccgagtagactttgaccgattacgtgggggtttcgattaccgtgttttt
cacctaaatttccgcgtacggtgtcaaagtccggtgthttactactgtaatagtaatcaattacggggtcattagttcatagccc
atatatggagttccgcgttacataacttacggtaaatggcccgcctggctgaccgcccaacgacccccgcccattgacgtc
aataatgacgtatgttcccatagtaacgccaatagggactttccattgacgtcaatgggtggagtatttacggtaaactgccc
acttggcagtacatcaagtgtatcatatgccaagtacgccccctattgacgtcaatgacggtaaatggcccgcctggcattat
gcccagtacatgaccttatgggactttcctacttggcagtacatctacgtattagtcatcgctattaccatggtgatgcggttttg
gcagtacatcaatgggcgtggatagcggtttgactcacggggatttccaagtctccaccccattgacgtcaatgggagtttgt
tttggcaccaaaatcaacgggactttccaaaatgtcgtaacaactccgccccattgacgcaaatgggcggtaggcgtgtac
ggtgggaggtctatataagcagagctgtccctatcagtgatagagatctccctatcagtgatagagagtttagtgaaccgtc
agatccgctagggtaccgcgatcgcaCctcgagctgatcataatcagccataccacatttgtagaggttttacttgctttaaa
aaacctcccacacctccccctgaacctgaaacataaaatgaatgcaattgttgttgttaacttgtttattgcagcttataatggtt
acaaataaagcaatagcatcacaaatttcacaaataaagcatttttttcactgcattctagttgtggtttgtccaaactcatcaat
gtatcttaccaggtgccgagcctgcgagtgcggagggaagcatgccaggttccagcccgtgtgtgtggatgtgacggagg
acctgcgacccgatcatttggtgttgccctgcaccgggacggagttcggttccagcggggaagaatctgactagagtgagt
agtgttctggggcgggggaggacctgcatgagggccagaataactgaaatctgtgcttttctgtgtgttgcagcagcatgag
cggaagcggctcctttgagggaggggtattcagcccttatctgacggggcgtctcccctcctgggcgggagtgcgtcagaa
tgtgatgggatccacggtggacggccggcccgtgcagcccgcgaactcttcaaccctgacctatgcaaccctgagctcttc
gtcgttggacgcagctgccgccgcagctgctgcatctgccgccagcgccgtgcgcggaatggccatgggcgccggctac
tacggcactctggtggccaactcgagttccaccaataatcccgccagcctgaacgaggagaagctgttgctgctgatggc
ccagctcgaggccttgacccagcgcctgggcgagctgacccagcaggtggctcagctgcaggagcagacgcgggccg
cggttgccacggtgaaatccaaataaaaaatgaatcaataaataaacggagacggttgttgattttaacacagagtctgaa
tctttatttgatttttcgcgcgcggtaggccctggaccaccggtctcgatcattgagcacccggtggatcttttccaggacccgg
tagaggtgggcttggatgttgaggtacatgggcatgagcccgtcccgggggtggaggtagctccattgcagggcctcgtgc
tcgggggtggtgttgtaaatcacccagtcatagcaggggcgcagggcatggtgttgcacaatatctttgaggaggagactg
atggccacgggcagccctttggtgtaggtgtttacaaatctgttgagctgggagggatgcatgcggggggagatgaggtgc
atcttggcctggatcttgagattggcgatgttaccgcccagatcccgcctggggttcatgttgtgcaggaccaccagcacggt
gtatccggtgcacttggggaatttatcatgcaacttggaagggaaggcgtgaaagaatttggcgacgcctttgtgcccgccc
aggttttccatgcactcatccatgatgatggcgatgggcccgtgggcggcggcctgggcaaagacgtttcgggggtcgga
cacatcatagttgtggtcctgggtgaggtcatcataggccattttaatgaatttggggcggagggtgccggactgggggaca
aaggtaccctcgatcccgggggcgtagttcccctcacagatctgcatctcccaggctttgagctcggagggggggatcatg
tccacctgcggggcgataaagaacacggtttccggggcgggggagatgagctgggccgaaagcaagttccggagcag
ctgggacttgccgcagccggtggggccgtagatgaccccgatgaccggctgcaggtggtagttgagggagagacagct
gccgtcctcccggaggaggggggccacctcgttcatcatctcgcgcacgtgcatgttctcgcgcaccagttccgccagga
ggcgctctccccccagggataggagctcctggagcgaggcgaagtttttcagcggcttgagtccgtcggccatgggcatttt
ggagagggtttgttgcaagagttccaggcggtcccagagctcggtgatgtgctctacggcatctcgatccagcagacctcct
cgtttcgcgggttgggacggctgcgggagtagggcaccagacgatgggcgtccagcgcagccagggtccggtccttcca
gggtcgcagcgtccgcgtcagggtggtctccgtcacggtgaaggggtgcgcgccgggctgggcgcttgcgagggtgcgc
ttcaggctcatccggctggtcgaaaaccgctcccgatcggcgccctgcgcgtcggccaggtagcaattgaccatgagttcg
tagttgagcgcctcggccgcgtggcctttggcgcggagcttacctttggaagtctgcccgcaggcgggacagaggaggg
acttgagggcgtagagcttgggggcgaggaagacggactcgggggcgtaggcgtccgcgccgcagtgggcgcagac
ggtctcgcactccacgagccaggtgaggtcgggctggtcggggtcaaaaaccagtttcccgccgttctttttgatgcgtttctt
acctttggtctccatgagctcgtgtccccgctgggtgacaaagaggctgtccgtgtccccgtagaccgactttatgggccggt
cctcgagcggtgtgccgcggtcctcctcgtagaggaaccccgcccactccgagacgaaagcccgggtccaggccagc
acgaaggaggccacgtgggacgggtagcggtcgttgtccaccagcgggtccaccttttccagggtatgcaaacacatgtc
cccctcgtccacatccaggaaggtgattggcttgtaagtgtaggccacgtgaccgggggtcccggccgggggggtataa
aagggtgcgggtccctgctcgtcctcactgtcttccggatcgctgtccaggagcgccagctgttggggtaggtattccctctc
gaaggcgggcatgacctcggcactcaggttgtcagtttctagaaacgaggaggatttgatattgacggtgccggcggaga
tgcctttcaagagcccctcgtccatctggtcagaaaagacgatctttttgttgtcgagcttggtggcgaaggagccgtagagg
gcgttggagaggagcttggcgatggagcgcatggtctggtttttttccttgtcggcgcgctccttggcggcgatgttgagctgc
acgtactcgcgcgccacgcacttccattcggggaagacggtggtcagctcgtcgggcacgattctgacctgccagccccg
attatgcagggtgatgaggtccacactggtggccacctcgccgcgcaggggctcattagtccagcagaggcgtccgccct
tgcgcgagcagaaggggggcagggggtccagcatgacctcgtcgggggggtcggcatcgatggtgaagatgccgggc
aggaggtcggggtcaaagtagctgatggaagtggccagatcgtccagggcagcttgccattcgcgcacggccagcgcg
cgctcgtagggactgaggggcgtgccccagggcatgggatgggtaagcgcggaggcgtacatgccgcagatgtcgtag
acgtagaggggctcctcgaggatgccgatgtaggtggggtagcagcgccccccgcggatgctggcgcgcacgtagtcat
acagctcgtgcgagggggcgaggagccccgggcccaggttggtgcgactgggcttttcggcgcggtagacgatctggc
ggaaaatggcatgcgagttggaggagatggtgggcctttggaagatgttgaagtgggcgtggggcagtccgaccgagtc
gcggatgaagtgggcgtaggagtcttgcagcttggcgacgagctcggcggtgactaggacgtccagagcgcagtagtcg
agggtctcctggatgatgtcatacttgagctgtcccttttgtttccacagctcgcggttgagaaggaactcttcgcggtccttcca
gtactcttcgagggggaacccgtcctgatctgcacggtaagagcctagcatgtagaactggttgacggccttgtaggcgca
gcagcccttctccacggggagggcgtaggcctgggcggccttgcgcagggaggtgtgcgtgagggcgaaagtgtccct
gaccatgaccttgaggaactggtgcttgaagtcgatatcgtcgcagcccccctgctcccagagctggaagtccgtgcgctt
cttgtaggcggggttgggcaaagcgaaagtaacatcgttgaagaggatcttgcccgcgcggggcataaagttgcgagtg
atgcggaaaggttggggcacctcggcccggttgttgatgacctgggcggcgagcacgatctcgtcgaagccgttgatgttg
tggcccacgatgtagagttccacgaatcgcggacggcccttgacgtggggcagtttcttgagctcctcgtaggtgagctcgt
cggggtcgctgagcccgtgctgctcgagcgcccagtcggcgagatgggggttggcgcggaggaaggaagtccagaga
tccacggccagggcggtttgcagacggtcccggtactgacggaactgctgcccgacggccattttttcgggggtgacgca
gtagaaggtgcgggggtccccgtgccagcgatcccatttgagctggagggcgagatcgagggcgagctcgacgagcc
ggtcgtccccggagagtttcatgaccagcatgaaggggacgagctgcttgccgaaggaccccatccaggtgtaggtttcc
acatcgtaggtgaggaagagcctttcggtgcgaggatgcgagccgatggggaagaactggatctcctgccaccaattgg
aggaatggctgttgatgtgatggaagtagaaatgccgacggcgcgccgaacactcgtgcttgtgtttatacaagcggccac
agtgctcgcaacgctgcacgggatgcacgtgctgcacgagctgtacctgagttcctttgacgaggaatttcagtgggaagt
ggagtcgtggcgcctgcatctcgtgctgtactacgtcgtggtggtcggcctggccctcttctgcctcgatggtggtcatgctga
cgagcccgcgcgggaggcaggtccagacctcggcgcgagcgggtcggagagcgaggacgagggcgcgcaggccg
gagctgtccagggtcctgagacgctgcggagtcaggtcagtgggcagcggcggcgcgcggttgacttgcaggagtttttc
cagggcgcgcgggaggtccagatggtacttgatctccaccgcgccattggtggcgacgtcgatggcttgcagggtcccgt
gcccctggggtgtgaccaccgtcccccgtttcttcttgggcggctggggcgacgggggcggtgcctcttccatggttagaag
cggcggcgaggacgcgcgccgggcggcaggggcggctcggggcccggaggcaggggcggcaggggcacgtcgg
cgccgcgcgcgggtaggttctggtactgcgcccggagaagactggcgtgagcgacgacgcgacggttgacgtcctggat
ctgacgcctctgggtgaaggccacgggacccgtgagtttgaacctgaaagagagttcgacagaatcaatctcggtatcgtt
gacggcggcctgccgcaggatctcttgcacgtcgcccgagttgtcctggtaggcgatctcggtcatgaactgctcgatctcct
cctcttgaaggtctccgcggccggcgcgctccacggtggccgcgaggtcgttggagatgcggcccatgagctgcgagaa
ggcgttcatgcccgcctcgttccagacgcggctgtagaccacgacgccctcgggatcgcGggcgcgcatgaccacctg
ggcgaggttgagctccacgtggcgcgtgaagaccgcgtagttgcagaggcgctggtagaggtagttgagcgtggtggcg
atgtgctcggtgacgaagaaatacatgatccagcggcggagcggcatctcgctgacgtcgcccagcgcctccaaacgtt
ccatggcctcgtaaaagtccacggcgaagttgaaaaactgggagttgcgcgccgagacggtcaactcctcctccagaag
acggatgagctcggcgatggtggcgcgcacctcgcgctcgaaggcccccgggagttcctccacttcctcttcttcctcctcc
actaacatctcttctacttcctcctcaggcggcagtggtggcgggggagggggcctgcgtcgccggcggcgcacgggca
gacggtcgatgaagcgctcgatggtctcgccgcgccggcgtcgcatggtctcggtgacggcgcgcccgtcctcgcgggg
ccgcagcgtgaagacgccgccgcgcatctccaggtggccgggggggtccccgttgggcagggagagggcgctgacg
atgcatcttatcaattgccccgtagggactccgcgcaaggacctgagcgtctcgagatccacgggatctgaaaaccgctg
aacgaaggcttcgagccagtcgcagtcgcaaggtaggctgagcacggtttcttctggcgggtcatgttggttgggagcggg
gcgggcgatgctgctggtgatgaagttgaaataggcggttctgagacggcggatggtggcgaggagcaccaggtctttgg
gcccggcttgctggatgcgcagacggtcggccatgccccaggcgtggtcctgacacctggccaggtccttgtagtagtcct
gcatgagccgctccacgggcacctcctcctcgcccgcgcggccgtgcatgcgcgtgagcccgaagccgcgctggggct
ggacgagcgccaggtcggcgacgacgcgctcggcgaggatggcttgctggatctgggtgagggtggtctggaagtcatc
aaagtcgacgaagcggtggtaggctccggtgttgatggtgtaggagcagttggccatgacggaccagttgacggtctggt
ggcccggacgcacgagctcgtggtacttgaggcgcgagtaggcgcgcgtgtcgaagatgtagtcgttgcaggtgcgcac
caggtactggtagccgatgaggaagtgcggcggcggctggcggtagagcggccatcgctcggtggcgggggcgccgg
gcgcgaggtcctcgagcatggtgcggtggtagccgtagatgtacctggacatccaggtgatgccggcggcggtggtgga
ggcgcgcgggaactcgcggacgcggttccagatgttgcgcagcggcaggaagtagttcatggtgggcacggtctggcc
cgtgaggcgcgcgcagtcgtggatgctctatacgggcaaaaacgaaagcggtcagcggctcgactccgtggcctggag
gctaagcgaacgggttgggctgcgcgtgtaccccggttcgaatctcgaatcaggctggagccgcagctaacgtggtattg
gcactcccgtctcgacccaagcctgcaccaaccctccaggatacggaggcgggtcgttttgcaacttttttttggaggccgg
atgagactagtaagcgcggaaagcggccgaccgcgatggctcgctgccgtagtctggagaagaatcgccagggttgcg
ttgcggtgtgccccggttcgaggccggccggattccgcggctaacgagggcgtggctgccccgtcgtttccaagaccccat
agccagccgacttctccagttacggagcgagcccctcttttgttttgtttgtttttgccagatgcatcccgtactgcggcagatgc
gcccccaccaccctccaccgcaacaacagccccctccacagccggcgcttctgcccccgccccagcagcaacttccag
ccacgaccgccgcggccgccgtgagcggggctggacagagttatgatcaccagctggccttggaagagggcgagggg
ctggcgcgcctgggggcgtcgtcgccggagcggcacccgcgcgtgcagatgaaaagggacgctcgcgaggcctacgt
gcccaagcagaacctgttcagagacaggagcggcgaggagcccgaggagatgcgcgcggcccggttccacgcggg
gcgggagctgcggcgcggcctggaccgaaagagggtgctgagggacgaggatttcgaggcggacgagctgacggg
gatcagccccgcgcgcgcgcacgtggccgcggccaacctggtcacggcgtacgagcagaccgtgaaggaggagag
caacttccaaaaatccttcaacaaccacgtgcgcaccctgatcgcgcgcgaggaggtgaccctgggcctgatgcacctgt
gggacctgctggaggccatcgtgcagaaccccaccagcaagccgctgacggcgcagctgttcctggtggtgcagcata
gtcgggacaacgaagcgttcagggaggcgctgctgaatatcaccgagcccgagggccgctggctcctggacctggtga
acattctgcagagcatcgtggtgcaggagcgcgggctgccgctgtccgagaagctggcggccatcaacttctcggtgctg
agtttgggcaagtactacgctaggaagatctacaagaccccgtacgtgcccatagacaaggaggtgaagatcgacgggt
tttacatgcgcatgaccctgaaagtgctgaccctgagcgacgatctgggggtgtaccgcaacgacaggatgcaccgtgcg
gtgagcgccagcaggcggcgcgagctgagcgaccaggagctgatgcatagtctgcagcgggccctgaccggggccg
ggaccgagggggagagctactttgacatgggcgcggacctgcactggcagcccagccgccgggccttggaggcggcg
gcaggaccctacgtagaagaggtggacgatgaggtggacgaggagggcgagtacctggaagactgatggcgcgacc
gtatttttgctagatgcaacaacaacagccacctcctgatcccgcgatgcgggcggcgctgcagagccagccgtccggca
ttaactcctcggacgattggacccaggccatgcaacgcatcatggcgctgacgacccgcaaccccgaagcctttagaca
gcagccccaggccaaccggctctcggccatcctggaggccgtggtgccctcgcgctccaaccccacgcacgagaaggt
cctggccatcgtgaacgcgctggtggagaacaaggccatccgcggcgacgaggccggcctggtgtacaacgcgctgct
ggagcgcgtggcccgctacaacagcaccaacgtgcagaccaacctggaccgcatggtgaccgacgtgcgcgaggcc
gtggcccagcgcgagcggttccaccgcgagtccaacctgggatccatggtggcgctgaacgccttcctcagcacccagc
ccgccaacgtgccccggggccaggaggactacaccaacttcatcagcgccctgcgcctgatggtgaccgaggtgcccc
agagcgaggtgtaccagtccgggccggactacttcttccagaccagtcgccagggcttgcagaccgtgaacctgagcca
ggctttcaagaacttgcagggcctgtggggcgtgcaggccccggtcggggaccgcgcgacggtgtcgagcctgctgacg
ccgaactcgcgcctgctgctgctgctggtggcccccttcacggacagcggcagcatcaaccgcaactcgtacctgggcta
cctgattaacctgtaccgcgaggccatcggccaggcgcacgtggacgagcagacctaccaggagatcacccacgtga
gccgcgccctgggccaggacgacccgggcaacctggaagccaccctgaactttttgctgaccaaccggtcgcagaaga
tcccgccccagtacgcgctcagcaccgaggaggagcgcatcctgcgttacgtgcagcagagcgtgggcctgttcctgatg
caggagggggccacccccagcgccgcgctcgacatgaccgcgcgcaacatggagcccagcatgtacgccagcaac
cgcccgttcatcaataaactgatggactacttgcatcgggcggccgccatgaactctgactatttcaccaacgccatcctga
atccccactggctcccgccgccggggttctacacgggcgagtacgacatgcccgaccccaatgacgggttcctgtggga
cgatgtggacagcagcgtgttctccccccgaccgggtgctaacgagcgccccttgtggaagaaggaaggcagcgaccg
acgcccgtcctcggcgctgtccggccgcgagggtgctgccgcggcggtgcccgaggccgccagtcctttcccgagcttgc
ccttctcgctgaacagtatccgcagcagcgagctgggcaggatcacgcgcccgcgcttgctgggcgaagaggagtactt
gaatgactcgctgttgagacccgagcgggagaagaacttccccaataacgggatagaaagcctggtggacaagatga
gccgctggaagacgtatgcgcaggagcacagggacgatccccgggcgtcgcagggggccacgagccggggcagcg
ccgcccgtaaacgccggtggcacgacaggcagcggggacagatgtgggacgatgaggactccgccgacgacagca
gcgtgttggacttgggtgggagtggtaacccgttcgctcacctgcgcccccgtatcgggcgcatgatgtaagagaaaccg
aaaataaatgatactcaccaaggccatggcgaccagcgtgcgttcgtttcttctctgttgttgttgtatctagtatgatgaggcgt
gcgtacccggagggtcctcctccctcgtacgagagcgtgatgcagcaggcgatggcggcggcggcgatgcagcccccg
ctggaggctccttacgtgcccccgcggtacctggcgcctacggaggggcggaacagcattcgttactcggagctggcacc
cttgtacgataccacccggttgtacctggtggacaacaagtcggcggacatcgcctcgctgaactaccagaacgaccac
agcaacttcctgaccaccgtggtgcagaacaatgacttcacccccacggaggccagcacccagaccatcaactttgacg
agcgctcgcggtggggcggccagctgaaaaccatcatgcacaccaacatgcccaacgtgaacgagttcatgtacagca
acaagttcaaggcgcgggtgatggtctcccgcaagacccccaatggggtgacagtgacagaggattatgatggtagtca
ggatgagctgaagtatgaatgggtggaatttgagctgcccgaaggcaacttctcggtgaccatgaccatcgacctgatga
acaacgccatcatcgacaattacttggcggtggggcggcagaacggggtgctggagagcgacatcggcgtgaagttcg
acactaggaacttcaggctgggctgggaccccgtgaccgagctggtcatgcccggggtgtacaccaacgaggctttccat
cccgatattgtcttgctgcccggctgcggggtggacttcaccgagagccgcctcagcaacctgctgggcattcgcaagag
gcagcccttccaggaaggcttccagatcatgtacgaggatctggaggggggcaacatccccgcgctcctggatgtcgac
gcctatgagaaaagcaaggaggatgcagcagctgaagcaactgcagccgtagctaccgcctctaccgaggtcagggg
cgataattttgcaagcgccgcagcagtggcagcggccgaggcggctgaaaccgaaagtaagatagtcattcagccggt
ggagaaggatagcaagaacaggagctacaacgtactaccggacaagataaacaccgcctaccgcagctggtaccta
gcctacaactatggcgaccccgagaagggcgtgcgctcctggacgctgctcaccacctcggacgtcacctgcggcgtgg
agcaagtctactggtcgctgcccgacatgatgcaagacccggtcaccttccgctccacgcgtcaagttagcaactacccg
gtggtgggcgccgagctcctgcccgtctactccaagagcttcttcaacgagcaggccgtctactcgcagcagctgcgcgc
cttcacctcgcttacgcacgtcttcaaccgcttccccgagaaccagatcctcgtccgcccgcccgcgcccaccattaccac
cgtcagtgaaaacgttcctgctctcacagatcacgggaccctgccgctgcgcagcagtatccggggagtccagcgcgtg
accgttactgacgccagacgccgcacctgcccctacgtctacaaggccctgggcatagtcgcgccgcgcgtcctctcgag
ccgcaccttctaaatgtccattctcatctcgcccagtaataacaccggttggggcctgcgcgcgcccagcaagatgtacgg
aggcgctcgccaacgctccacgcaacaccccgtgcgcgtgcgcgggcacttccgcgctccctggggcgccctcaaggg
ccgcgtgcggtcgcgcaccaccgtcgacgacgtgatcgaccaggtggtggccgacgcgcgcaactacacccccgccg
ccgcgcccgtctccaccgtggacgccgtcatcgacagcgtggtggcCgacgcgcgccggtacgcccgcgccaagagc
cggcggcggcgcatcgcccggcggcaccggagcacccccgccatgcgcgcggcgcgagccttgctgcgcagggcca
ggcgcacgggacgcagggccatgctcagggcggccagacgcgcggcttcaggcgccagcgccggcaggacccgga
gacgcgcggccacggcggcggcagcggccatcgccagcatgtcccgcccgcggcgagggaacgtgtactgggtgcg
cgacgccgccaccggtgtgcgcgtgcccgtgcgcacccgcccccctcgcacttgaagatgttcacttcgcgatgttgatgt
gtcccagcggcgaggaggatgtccaagcgcaaattcaaggaagagatgctccaggtcatcgcgcctgagatctacggc
cctgcggtggtgaaggaggaaagaaagccccgcaaaatcaagcgggtcaaaaaggacaaaaaggaagaagaaag
tgatgtggacggattggtggagtttgtgcgcgagttcgccccccggcggcgcgtgcagtggcgcgggcggaaggtgcaa
ccggtgctgagacccggcaccaccgtggtcttcacgcccggcgagcgctccggcaccgcttccaagcgctcctacgacg
aggtgtacggggatgatgatattctggagcaggcggccgagcgcctgggcgagtttgcttacggcaagcgcagccgttcc
gcaccgaaggaagaggcggtgtccatcccgctggaccacggcaaccccacgccgagcctcaagcccgtgaccttgca
gcaggtgctgccgaccgcggcgccgcgccgggggttcaagcgcgagggcgaggatctgtaccccaccatgcagctga
tggtgcccaagcgccagaagctggaagacgtgctggagaccatgaaggtggacccggacgtgcagcccgaggtcaa
ggtgcggcccatcaagcaggtggccccgggcctgggcgtgcagaccgtggacatcaagattcccacggagcccatgg
aaacgcagaccgagcccatgatcaagcccagcaccagcaccatggaggtgcagacggatccctggatgccatcggct
cctagtcgaagaccccggcgcaagtacggcgcggccagcctgctgatgcccaactacgcgctgcatccttccatcatccc
cacgccgggctaccgcggcacgcgcttctaccgcggtcataccagcagccgccgccgcaagaccaccactcgccgcc
gccgtcgccgcaccgccgctgcaaccacccctgccgccctggtgcggagagtgtaccgccgcggccgcgcacctctga
ccctgccgcgcgcgcgctaccacccgagcatcgccatttaaactttcgccTgctttgcagatcaatggccctcacatgccg
ccttcgcgttcccattacgggctaccgaggaagaaaaccgcgccgtagaaggctggcggggaacgggatgcgtcgcca
ccaccaccggcggcggcgcgccatcagcaagcggttggggggaggcttcctgcccgcgctgatccccatcatcgccgc
ggcgatcggggcgatccccggcattgcttccgtggcggtgcaggcctctcagcgccactgagacacacttggaaacatct
tgtaataaaccAatggactctgacgctcctggtcctgtgatgtgttttcgtagacagatggaagacatcaatttttcgtccctgg
ctccgcgacacggcacgcggccgttcatgggcacctggagcgacatcggcaccagccaactgaacgggggcgccttc
aattggagcagtctctggagcgggcttaagaatttcgggtccacgcttaaaacctatggcagcaaggcgtggaacagcac
cacagggcaggcgctgagggataagctgaaagagcagaacttccagcagaaggtggtcgatgggctcgcctcgggca
tcaacggggtggtggacctggccaaccaggccgtgcagcggcagatcaacagccgcctggacccggtgccgcccgcc
ggctccgtggagatgccgcaggtggaggaggagctgcctcccctggacaagcggggcgagaagcgaccccgccccg
atgcggaggagacgctgctgacgcacacggacgagccgcccccgtacgaggaggcggtgaaactgggtctgcccac
cacgcggcccatcgcgcccctggccaccggggtgctgaaacccgaaaagcccgcgaccctggacttgcctcctcccca
gccttcccgcccctctacagtggctaagcccctgccgccggtggccgtggcccgcgcgcgacccgggggcaccgcccg
ccctcatgcgaactggcagagcactctgaacagcatcgtgggtctgggagtgcagagtgtgaagcgccgccgctgctatt
aaacctaccgtagcgcttaacttgcttgtctgtgtgtgtatgtattatgtcgccgccgccgctgtccaccagaaggaggagtg
aagaggcgcgtcgccgagttgcaagatggccaccccatcgatgctgccccagtgggcgtacatgcacatcgccggaca
ggacgcttcggagtacctgagtccgggtctggtgcagtttgcccgcgccacagacacctacttcagtctggggaacaagttt
aggaaccccacggtggcgcccacgcacgatgtgaccaccgaccgcagccagcggctgacgctgcgcttcgtgcccgt
ggaccgcgaggacaacacctactcgtacaaagtgcgctacacgctggccgtgggcgacaaccgcgtgctggacatgg
ccagcacctactttgacatccgcggcgtgctggatcggggccctagcttcaaaccctactccggcaccgcctacaacagtc
tggcccccaagggagcacccaacacttgtcagtggacatataaagccgatggtgaaactgccacagaaaaaacctata
catatggaaatgcacccgtgcagggcattaacatcacaaaagatggtattcaacttggaactgacaccgatgatcagcca
atctacgcagataaaacctatcagcctgaacctcaagtgggtgatgctgaatggcatgacatcactggtactgatgaaaag
tatggaggcagagctcttaagcctgataccaaaatgaagccttgttatggttcttttgccaagcctactaataaagaaggag
gtcaggcaaatgtgaaaacaggaacaggcactactaaagaatatgacatagacatggctttctttgacaacagaagtgc
ggctgctgctggcctagctccagaaattgttttgtatactgaaaatgtggatttggaaactccagatacccatattgtatacaa
agcaggcacagatgacagcagctcttctattaatttgggtcagcaagccatgcccaacagacctaactacattggtttcag
agacaactttatcgggctcatgtactacaacagcactggcaatatgggggtgctggccggtcaggcttctcagctgaatgct
gtggttgacttgcaagacagaaacaccgagctgtcctaccagctcttgcttgactctctgggtgacagaacccggtatttcag
tatgtggaatcaggcggtggacagctatgatcctgatgtgcgcattattgaaaatcatggtgtggaggatgaacttcccaact
attgtttccctctggatgctgttggcagaacagatacttatcagggaattaaggctaatggaactgatcaaaccacatggacc
aaagatgacagtgtcaatgatgctaatgagataggcaagggtaatccattcgccatggaaatcaacatccaagccaacct
gtggaggaacttcctctacgccaacgtggccctgtacctgcccgactcttacaagtacacgccggccaatgttaccctgcc
caccaacaccaacacctacgattacatgaacggccgggtggtggcgccctcgctggtggactcctacatcaacatcggg
gcgcgctggtcgctggatcccatggacaacgtgaaccccttcaaccaccaccgcaatgcggggctgcgctaccgctcca
tgctcctgggcaacgggcgctacgtgcccttccacatccaggtgccccagaaatttttcgccatcaagagcctcctgctcct
gcccgggtcctacacctacgagtggaacttccgcaaggacgtcaacatgatcctgcagagctccctcggcaacgacctg
cgcacggacggggcctccatctccttcaccagcatcaacctctacgccaccttcttccccatggcgcacaacacggcctcc
acgctcgaggccatgctgcgcaacgacaccaacgaccagtccttcaacgactacctctcggcggccaacatgctctacc
ccatcccggccaacgccaccaacgtgcccatctccatcccctcgcgcaactgggccgccttccgcggctggtccttcacg
cgtctcaagaccaaggagacgccctcgctgggctccgggttcgacccctacttcgtctactcgggctccatcccctacctcg
acggcaccttctacctcaaccacaccttcaagaaggtctccatcaccttcgactcctccgtcagctggcccggcaacgacc
ggctcctgacgcccaacgagttcgaaatcaagcgcaccgtcgacggcgagggctacaacgtggcccagtgcaacatg
accaaggactggttcctggtccagatgctggcccactacaacatcggctaccagggcttctacgtgcccgagggctacaa
ggaccgcatgtactccttcttccgcaacttccagcccatgagccgccaggtggtggacgaggtcaactacaaggactacc
aggccgtcaccctggcctaccagcacaacaactcgggcttcgtcggctacctcgcgcccaccatgcgccagggccagc
cctaccccgccaactacccctacccgctcatcggcaagagcgccgtcaccagcgtcacccagaaaaagttcctctgcga
cagggtcatgtggcgcatccccttctccagcaacttcatgtccatgggcgcgctcaccgacctcggccagaacatgctctat
gccaactccgcccacgcgctagacatgaatttcgaagtcgaccccatggatgagtccacccttctctatgttgtcttcgaagt
cttcgacgtcgtccgagtgcaccagccccaccgcggcgtcatcgaggccgtctacctgcgcacccccttctcggccggta
acgccaccacctaagctcttgcttcttgcaagccatggccgcgggctccggcgagcaggagctcagggccatcatccgc
gacctgggctgcgggccctacttcctgggcaccttcgataagcgcttcccgggattcatggccccgcacaagctggcctgc
gccatcgtcaacacggccggccgcgagaccgggggcgagcactggctggccttcgcctggaacccgcgctcgaacac
ctgctacctcttcgaccccttcgggttctcggacgagcgcctcaagcagatctaccagttcgagtacgagggcctgctgcgc
cgcagcgccctggccaccgaggaccgctgcgtcaccctggaaaagtccacccagaccgtgcagggtccgcgctcggc
cgcctgcgggctcttctgctgcatgttcctgcacgccttcgtgcactggcccgaccgccccatggacaagaaccccaccat
gaacttgctgacgggggtgcccaacggcatgctccagtcgccccaggtggaacccaccctgcgccgcaaccaggagg
cgctctaccgcttcctcaactcccactccgcctactttcgctcccaccgcgcgcgcatcgagaaggccaccgccttcgacc
gcatgaatcaagacatgtaaaccgtgtgtgtatgttaaatgtctttaataaacagcactttcatgttacacatgcatctgagatg
atttatttagaaatcgaaagggttctgccgggtctcggcatggcccgcgggcagggacacgttgcggaactggtacttggc
cagccacttgaactcggggatcagcagtttgggcagcggggtgtcggggaaggagtcggtccacagcttccgcgtcagtt
gcagggcgcccagcaggtcgggcgcggagatcttgaaatcgcagttgggacccgcgttctgcgcgcgggagttgcggt
acacggggttgcagcactggaacaccatcagggccgggtgcttcacgctcgccagcaccgtcgcgtcggtgatgctctcc
acgtcgaggtcctcggcgttggccatcccgaagggggtcatcttgcaggtctgccttcccatggtgggcacgcacccgggc
ttgtggttgcaatcgcagtgcagggggatcagcatcatctgggcctggtcggcgttcatccccgggtacatggccttcatga
aagcctccaattgcctgaacgcctgctgggccttggctccctcggtgaagaagaccccgcaggacttgctagagaactgg
ttggtggcgcacccggcgtcgtgcacgcagcagcgcgcgtcgttgttggccagctgcaccacgctgcgcccccagcggtt
ctgggtgatcttggcccggtcggggttctccttcagcgcgcgctgcccgttctcgctcgccacatccatctcgatcatgtgctcc
ttctggatcatggtggtcccgtgcaggcaccgcagcttgccctcggcctcggtgcacccgtgcagccacagcgcgcaccc
ggtgcactcccagttcttgtgggcgatctgggaatgcgcgtgcacgaagccctgcaggaagcggcccatcatggtggtca
gggtcttgttgctagtgaaggtcagcggaatgccgcggtgctcctcgttgatgtacaggtggcagatgcggcggtacacctc
gccctgctcgggcatcagctggaagttggctttcaggtcggtctccacgcggtagcggtccatcagcatagtcatgatttcca
tacccttctcccaggccgagacgatgggcaggctcatagggttcttcaccatcatcttagcgctagcagccgcggccaggg
ggtcgctctcgtccagggtctcaaagctccgcttgccgtccttctcggtgatccgcaccggggggtagctgaagcccacgg
ccgccagctcctcctcggcctgtctttcgtcctcgctgtcctggctgacgtcctgcaggaccacatgcttggtcttgcggggtttc
ttcttgggcggcagcggcggcggagatgttggagatggcgagggggagcgcgagttctcgctcaccactactatctcttcc
tcttcttggtccgaggccacgcggcggtaggtatgtctcttcgggggcagaggcggaggcgacgggctctcgccgccgcg
acttggcggatggctggcagagccccttccgcgttcgggggtgcgctcccggcggcgctctgactgacttcctccgcggcc
ggccattgtgttctcctagggaggaacaacaagcatggagactcagccatcgccaacctcgccatctgcccccaccgcc
gacgagaagcagcagcagcagaatgaaagcttaaccgccccgccgcccagccccgccacctccgacgcggccgtcc
cagacatgcaagagatggaggaatccatcgagattgacctgggctatgtgacgcccgcggagcacgaggaggagctg
gcagtgcgcttttcacaagaagagatacaccaagaacagccagagcaggaagcagagaatgagcagagtcaggctg
ggctcgagcatgacggcgactacctccacctgagcgggggggaggacgcgctcatcaagcatctggcccggcaggcc
accatcgtcaaggatgcgctgctcgaccgcaccgaggtgcccctcagcgtggaggagctcagccgcgcctacgagttga
acctcttctcgccgcgcgtgccccccaagcgccagcccaatggcacctgcgagcccaacccgcgcctcaacttctaccc
ggtcttcgcggtgcccgaggccctggccacctaccacatctttttcaagaaccaaaagatccccgtctcctgccgcgccaa
ccgcacccgcgccgacgcccttttcaacctgggtcccggcgcccgcctacctgatatcgcctccttggaagaggttcccaa
gatcttcgagggtctgggcagcgacgagactcgggccgcgaacgctctgcaaggagaaggaggagagcatgagcac
cacagcgccctggtcgagttggaaggcgacaacgcgcggctggcggtgctcaaacgcacggtcgagctgacccatttc
gcctacccggctctgaacctgccccccaaagtcatgagcgcggtcatggaccaggtgctcatcaagcgcgcgtcgccca
tctccgaggacgagggcatgcaagactccgaggagggcaagcccgtggtcagcgacgagcagctggcccggtggctg
ggtcctaatgctagtccccagagtttggaagagcggcgcaaactcatgatggccgtggtcctggtgaccgtggagctgga
gtgcctgcgccgcttcttcgccgacgcggagaccctgcgcaaggtcgaggagaacctgcactacctcttcaggcacgggt
tcgtgcgccaggcctgcaagatctccaacgtggagctgaccaacctggtctcctacatgggcatcttgcacgagaaccgc
ctggggcagaacgtgctgcacaccaccctgcgcggggaggcccggcgcgactacatccgcgactgcgtctacctctac
ctctgccacacctggcagacgggcatgggcgtgtggcagcagtgtctggaggagcagaacctgaaagagctctgcaag
ctcctgcagaagaacctcaagggtctgtggaccgggttcgacgagcgcaccaccgcctcggacctggccgacctcatttt
ccccgagcgcctcaggctgacgctgcgcaacggcctgcccgactttatgagccaaagcatgttgcaaaactttcgctctttc
atcctcgaacgctccggaatcctgcccgccacctgctccgcgctgccctcggacttcgtgccgctgaccttccgcgagtgcc
ccccgccgctgtggagccactgctacctgctgcgcctggccaactacctggcctaccactcggacgtgatcgaggacgtc
agcggcgagggcctgctcgagtgccactgccgctgcaacctctgcacgccgcaccgctccctggcctgcaacccccag
ctgctgagcgagacccagatcatcggcaccttcgagttgcaagggcccagcgaaggcgagggttcagccgccaaggg
gggtctgaaactcaccccggggctgtggacctcggcctacttgcgcaagttcgtgcccgaggactaccatcccttcgagat
caggttctacgaggaccaatcccatccgcccaaggccgagctgtcggcctgcgtcatcacccagggggcgatcctggcc
caattgcaagccatccagaaatcccgccaagaattcttgctgaaaaagggccgcggggtctacctcgacccccagaccg
gtgaggagctcaaccccggcttcccccaggatgccccgaggaaacaagaagctgaaagtggagctgccgcccgtgga
ggatttggaggaagactgggagaacagcagtcaggcagaggaggaggagatggaggaagactgggacagcactca
ggcagaggaggacagcctgcaagacagtctggaggaagacgaggaggaggcagaggaggaggtggaagaagca
gccgccgccagaccgtcgtcctcggcgggggagaaagcaagcagcacggataccatctccgctccgggtcggggtcc
cgctcgaccacacagtagatgggacgagaccggacgattcccgaaccccaccacccagaccggtaagaaggagcg
gcagggatacaagtcctggcgggggcacaaaaacgccatcgtctcctgcttgcaggcctgcgggggcaacatctccttc
acccggcgctacctgctcttccaccgcggggtgaactttccccgcaacatcttgcattactaccgtcacctccacagcccct
actacttccaagaagaggcagcagcagcagaaaaagaccagcagaaaaccagcagctagaaaatccacagcggc
ggcagcaggtggactgaggatcgcggcgaacgagccggcgcaaacccgggagctgaggaaccggatctttcccacc
ctctatgccatcttccagcagagtcgggggcaggagcaggaactgaaagtcaagaaccgttctctgcgctcgctcacccg
cagttgtctgtatcacaagagcgaagaccaacttcagcgcactctcgaggacgccgaggctctcttcaacaagtactgcg
cgctcactcttaaagagtagcccgcgcccgcccagtcgcagaaaaaggcgggaattacgtcacctgtgcccttcgcccta
gccgcctccacccatcatcatgagcaaagagattcccacgccttacatgtggagctaccagccccagatgggcctggcc
gccggtgccgcccaggactactccacccgcatgaattggctcagcgccgggcccgcgatgatctcacgggtgaatgaca
tccgcgcccaccgaaaccagatactcctagaacagtcagcgctcaccgccacgccccgcaatcacctcaatccgcgta
attggcccgccgccctggtgtaccaggaaattccccagcccacgaccgtactacttccgcgagacgcccaggccgaagt
ccagctgactaactcaggtgtccagctggcgggcggcgccaccctgtgtcgtcaccgccccgctcagggtataaagcgg
ctggtgatccggggcagaggcacacagctcaacgacgaggtggtgagctcttcgctgggtctgcgacctgacggagtctt
ccaactcgccggatcggggagatcttccttcacgcctcgtcaggccgtcctgactttggagagttcgtcctcgcagccccgc
tcgggtggcatcggcactctccagttcgtggaggagttcactccctcggtctacttcaaccccttctccggctcccccggcca
ctacccggacgagttcatcccgaacttcgacgccatcagcgagtcggtggacggctacgattgaatgtcccatggtggcg
cagctgacctagctcggcttcgacacctggaccactgccgccgcttccgctgcttcgctcgggatctcgccgagtttgcctac
tttgagctgcccgaggagcaccctcagggcccggcccacggagtgcggatcgtcgtcgaagggggcctcgactcccac
ctgcttcggatcttcagccagcgtccgatcctggtcgagcgcgagcaaggacagacccttctgactctgtactgcatctgca
accaccccggcctgcatgaaagtctttgttgtctgctgtgtactgagtataataaaagctgagatcagcgactactccggact
tccgtgtgtTTAAACtcacccccttatccagtgaaataaagatcatattgatgatgattttacagaaataaaaaataatcatt
tgatttgaaataaagatacaatcatattgatgatttgagtttaacaaaaaaataaagaatcacttacttgaaatctgataccag
gtctctgtccatgttttctgccaacaccacttcactcccctcttcccagctctggtactgcaggccccggcgggctgcaaacttc
ctccacacgctgaaggggatgtcaaattcctcctgtccctcaatcttcattttatcttctatcagatgtccaaaaagcgcgtccg
ggtggatgatgacttcgaccccgtctacccctacgatgcagacaacgcaccgaccgtgcccttcatcaacccccccttcgt
ctcttcagatggattccaagagaagcccctgggggtgttgtccctgcgactggccgaccccgtcaccaccaagaacggg
gaaatcaccctcaagctgggagagggggtggacctcgattcctcgggaaaactcatctccaacacggccaccaaggcc
gccgcccctctcagtttttccaacaacaccatttcccttaacatggatcaccccttttacactaaagatggaaaattatccttac
aagtttctccaccattaaatatactgagaacaagcattctaaacacactagctttaggttttggatcaggtttaggactccgtgg
ctctgccttggcagtacagttagtctctccacttacatttgatactgatggaaacataaagcttaccttagacagaggtttgcat
gttacaacaggagatgcaattgaaagcaacataagctgggctaaaggtttaaaatttgaagatggagccatagcaacca
acattggaaatgggttagagtttggaagcagtagtacagaaacaggtgttgatgatgcttacccaatccaagttaaacttgg
atctggccttagctttgacagtacaggagccataatggctggtaacaaagaagacgataaactcactttgtggacaacacc
tgatccatcaccaaactgtcaaatactcgcagaaaatgatgcaaaactaacactttgcttgactaaatgtggtagtcaaata
ctggccactgtgtcagtcttagttgtaggaagtggaaacctaaaccccattactggcaccgtaagcagtgctcaggtgtttct
acgttttgatgcaaacggtgttcttttaacagaacattctacactaaaaaaatactgggggtataggcagggagatagcata
gatggcactccatataccaatgctgtaggattcatgcccaatttaaaagcttatccaaagtcacaaagttctactactaaaaa
taatatagtagggcaagtatacatgaatggagatgtttcaaaacctatgcttctcactataaccctcaatggtactgatgaca
gcaacagtacatattcaatgtcattttcatacacctggactaatggaagctatgttggagcaacatttggggctaactcttatac
cttctcatacatcgcccaagaatgaacactgtatcccaccctgcatgccaacccttcccaccccactctgtggaacaaactc
tgaaacacaaaataaaataaagttcaagtgttttattgattcaacagttttacaggattcgagcagttatttttcctccaccctcc
caggacatggaatacaccaccctctccccccgcacagccttgaacatctgaatgccattggtgatggacatgcttttggtctc
cacgttccacacagtttcagagcgagccagtctcgggtcggtcagggagatgaaaccctccgggcactcccgcatctgca
cctcacagctcaacagctgaggattgtcctcggtggtcgggatcacggttatctggaagaagcagaagagcggcggtgg
gaatcatagtccgcgaacgggatcggccggtggtgtcgcatcaggccccgcagcagtcgctgccgccgccgctccgtca
agctgctgctcagggggtccgggtccagggactccctcagcatgatgcccacggccctcagcatcagtcgtctggtgcgg
cgggcgcagcagcgcatgcggatctcgctcaggtcgctgcagtacgtgcaacacagaaccaccaggttgttcaacagtc
catagttcaacacgctccagccgaaactcatcgcgggaaggatgctacccacgtggccgtcgtaccagatcctcaggta
aatcaagtggtgccccctccagaacacgctgcccacgtacatgatctccttgggcatgtggcggttcaccacctcccggta
ccacatcaccctctggttgaacatgcagccccggatgatcctgcggaaccacagggccagcaccgccccgcccgccat
gcagcgaagagaccccgggtcccggcaatggcaatggaggacccaccgctcgtacccgtggatcatctgggagctga
acaagtctatgttggcacagcacaggcatatgctcatgcatctcttcagcactctcaactcctcgggggtcaaaaccatatc
ccagggcacggggaactcttgcaggacagcgaaccccgcagaacagggcaatcctcgcacagaacttacattgtgcat
ggacagggtatcgcaatcaggcagcaccgggtgatcctccaccagagaagcgcgggtctcggtctcctcacagcgtggt
aagggggccggccgatacgggtgatggcgggacgcggctgatcgtgttcgcgaccgtgtcatgatgcagttgctttcgga
cattttcgtacttgctgtagcagaacctggtccgggcgctgcacaccgatcgccggcggcggtctcggcgcttggaacgctc
ggtgttgaaattgtaaaacagccactctctcagaccgtgcagcagatctagggcctcaggagtgatgaagatcccatcatg
cctgatggctctgatcacatcgaccaccgtggaatgggccagacccagccagatgatgcaattttgttgggtttcggtgacg
gcgggggagggaagaacaggaagaaccatgattaacttttaatccaaacggtctcggagtacttcaaaatgaagatcgc
ggagatggcacctctcgcccccgctgtgttggtggaaaataacagccaggtcaaaggtgatacggttctcgagatgttcca
cggtggcttccagcaaagcctccacgcgcacatccagaaacaagacaatagcgaaagcgggagggttctctaattcctc
aatcatcatgttacactcctgcaccatccccagataattttcatttttccagccttgaatgattcgaactagttcCtgaggtaaat
ccaagccagccatgataaagagctcgcgcagagcgccctccaccggcattcttaagcacaccctcataattccaagatat
tctgctcctggttcacctgcagcagattgacaagcggaatatcaaaatctctgccgcgatccctgagctcctccctcagcaat
aactgtaagtactctttcatatcctctccgaaatttttagccataggaccaccaggaataagattagggcaagccacagtac
agataaaccgaagtcctccccagtgagcattgccaaatgcaagactgctataagcatgctggctagacccggtgatatctt
ccagataactggacagaaaatcgcccaggcaatttttaagaaaatcaacaaaagaaaaatcctccaggtggacgtttag
agcctcgggaacaacgatgaagtaaatgcaagcggtgcgttccagcatggttagttagctgatctgtagaaaaaacaaa
aatgaacattaaaccatgctagcctggcgaacaggtgggtaaatcgttctctccagcaccaggcaggccacggggtctcc
ggcgcgaccctcgtaaaaattgtcgctatgattgaaaaccatcacagagagacgttcccggtggccggcgtgaatgattc
gacaagatgaatacacccccggaacattggcgtccgcgagtgaaaaaaagcgcccgaggaagcaataaggcactac
aatgctcagtctcaagtccagcaaagcgatgccatgcggatgaagcacaaaattctcaggtgcgtacaaaatgtaattact
cccctcctgcacaggcagcaaagcccccgatccctccaggtacacatacaaagcctcagcgtccatagcttaccgagca
gcagcacacaacaggcgcaagagtcagagaaaggctgagctctaacctgtccacccgctctctgctcaatatatagccc
agatctacactgacgtaaaggccaaagtctaaaaatacccgccaaataatcacacacgcccagcacacgcccagaaa
ccggtgacacactcaaaaaaatacgcgcacttcctcaaacgcccaaaactgccgtcatttccgggttcccacgctacgtc
atcaaaacacgactttcaaattccgtcgaccgttaaaaacgtcacccgccccgcccctaacggtcgcccgtctctcagcca
atcagcgccccgcatccccaaattcaaacacctcatttgcatattaacgcgcacaaaaagtttgaggtatattattgatgatg
g
SEQ ID NO: 5-Plasmid 1103 ORF (cMSLN)
atggctagcctggctggcgagacaggacaggaagccgctcctctggacggcgtgctggccaaccctcccaatatcagc
agcctgagccccagacagctgctgggattcccttgtgccgaggtgtccggcctgagcacagagagagtgcgggaactgg
ctgtggccctggcccagaaaaacgtgaagctgagcaccgagcagctgcggtgcctggcccacagactgtctgagcctcc
cgaggatctggacgccctgcctctggatctgctgctgttcctgaaccccgacgccttcagcggacctcaggcctgcacccg
gttcttcagcagaatcaccaaggccaacgtggacctgctgcccagaggcgcccctgagagacagagactgctgcctgct
gctctggcctgttggggagtgcggggctctctgctgtctgaagctgatgtgcgggccctgggaggcctggcttgtgatctgcc
tggaagattcgtggccgagagcgccgaagtgctgctgcctagactggtgtcctgtcccggccctctggaccaggatcagc
aggaagctgccagagctgctctgcagggcggaggccctccttatggacctcctagcacttggagcgtgtccaccatggat
gccctgaggggcctgctgccagtgctgggccagcctatcatcagatccatcccacagggcatcgtggccgcctggcggc
agagaagctctagagatccctcttggcggcagcccgagcggacaatcctgcggcccaggtttcggagagaggtggaaa
agaccgcctgcccctctggcaagaaggccagagagatcgacgagagcctgatcttctacaagaagtgggagctggaa
gcctgcgtggacgccgctctgctggccacccagatggacagagtgaacgccatccccttcacctatgagcagctggacgt
gctgaagcacaagctggatgagctgtacccccagggctaccccgagagcgtgatccagcacctgggctacctgtttctga
agatgagccccgaggacatccggaagtggaacgtgaccagcctggaaaccctgaaggccctgctggaagtgaacaa
gggccacgagatgtccccccaggtggccacactgatcgacagattcgtgaagggcagaggccagctggacaaggaca
ccctggatacactgaccgccttctaccccggctatctgtgcagcctgtcccccgaggaactgagcagcgtgccacctagct
ctatctgggctgtgcggccccaggacctggatacctgcgatcctagacagctggatgtgctgtatcccaaggcccggctgg
ccttccagaacatgaacggcagcgagtacttcgtgaagatccagtccttcctgggcggagcccctaccgaggacctgaa
agctctgagccagcagaacgtgtccatggatctggccacctttatgaagctgcggaccgacgccgtgctgcctctgacagt
ggctgaggtgcagaaactgctgggcccccatgtggaagggctgaaggccgaagaacggcacagacccgtgcgcgac
tggatcctgaggcagagacaggatgacctggacacactgggcctgggactgcaggggggcatccctaatggctacctg
gtgctggacctgagcatgcaggaagccctg
SEQ ID NO: 6-Plasmid 1103 Polypeptide (cMSLN)
MASLAGETGQEAAPLDGVLANPPNISSLSPRQLLGFPCAEVSGLSTERVRELAVALAQ
KNVKLSTEQLRCLAHRLSEPPEDLDALPLDLLLFLNPDAFSGPQACTRFFSRITKANVDL
LPRGAPERQRLLPAALACWGVRGSLLSEADVRALGGLACDLPGRFVAESAEVLLPRLV
SCPGPLDQDQQEAARAALQGGGPPYGPPSTWSVSTMDALRGLLPVLGQPIIRSIPQGI
VAAWRQRSSRDPSWRQPERTILRPRFRREVEKTACPSGKKAREIDESLIFYKKWELEA
CVDAALLATQMDRVNAIPFTYEQLDVLKHKLDELYPQGYPESVIQHLGYLFLKMSPEDI
RKWNVTSLETLKALLEVNKGHEMSPQVATLIDRFVKGRGQLDKDTLDTLTAFYPGYLC
SLSPEELSSVPPSSIWAVRPQDLDTCDPRQLDVLYPKARLAFQNMNGSEYFVKIQSFL
GGAPTEDLKALSQQNVSMDLATFMKLRTDAVLPLTVAEVQKLLGPHVEGLKAEERHRP
VRDWILRQRQDDLDTLGLGLQGGIPNGYLVLDLSMQEAL
SEQ ID NO: 7-Plasmid 1027 ORF (MUC1)
atggctagcacccctggaacccagagccccttcttccttctgctgctgctgaccgtgctgactgtcgtgacaggctctggcca
cgccagctctacacctggcggcgagaaagagacaagcgccacccagagaagcagcgtgccaagcagcaccgaga
agaacgccgtgtccatgaccagctccgtgctgagcagccactctcctggcagcggcagcagcacaacacagggccag
gatgtgacactggcccctgccacagaacctgcctctggatctgccgccacctggggacaggacgtgacaagcgtgccag
tgaccagacctgccctgggctctacaacaccccctgcccacgatgtgaccagcgcccctgataacaagcctgcccctgg
aagcacagcccctccagctcatggcgtgacctctgccccagataccagaccagccccaggatctacagccccacccgc
acacggcgtgacaagtgcccctgacacaagacccgctccaggctctactgctcctcctgcccatggcgtgacaagcgctc
ccgatacaaggccagctcctggctccacagcaccaccagcacatggcgtgacatcagctcccgacactagacctgctcc
cggatcaaccgctccaccagctcacggcgtgaccagcgcacctgataccagacctgctctgggaagcaccgcccctcc
cgtgcacaatgtgacatctgcttccggcagcgccagcggctctgcctctacactggtgcacaacggcaccagcgccaga
gccacaacaaccccagccagcaagagcacccccttcagcatccctagccaccacagcgacacccctaccacactggc
cagccactccaccaagaccgatgcctctagcacccaccactccagcgtgccccctctgaccagcagcaaccacagcac
aagcccccagctgtctaccggcgtctcattcttctttctgtccttccacatcagcaacctgcagttcaacagcagcctggaag
atcccagcaccgactactaccaggaactgcagcgggatatcagcgagatgttcctgcaaatctacaagcagggcggctt
cctgggcctgagcaacatcaagttcagacccggcagcgtggtggtgcagctgaccctggctttccgggaaggcaccatc
aacgtgcacgacgtggaaacccagttcaaccagtacaagaccgaggccgccagccggtacaacctgaccatctccgat
gtgtccgtgtccgacgtgcccttcccattctctgcccagtctggcgcaggcgtgccaggatggggaattgctctgctggtgctc
gtgtgcgtgctggtggccctggccatcgtgtatctgattgccctggccgtgtgccagtgccggcggaagaattacggccagc
tggacatcttccccgccagagacacctaccaccccatgagcgagtaccccacataccacacccacggcagatacgtgc
cacccagctccaccgacagatccccctacgagaaagtgtctgccggcaacggcggcagctccctgagctacacaaatc
ctgccgtggccgctgcctccgccaacctg
SEQ ID NO: 8-Plasmid 1027 Polypeptide (537 aa) (MUC1)
MASTPGTQSPFFLLLLLTVLTVVTGSGHASSTPGGEKETSATQRSSVPSSTEKNAVSM
TSSVLSSHSPGSGSSTTQGQDVTLAPATEPASGSAATWGQDVTSVPVTRPALGSTTP
PAHDVTSAPDNKPAPGSTAPPAHGVTSAPDTRPAPGSTAPPAHGVTSAPDTRPAPGS
TAPPAHGVTSAPDTRPAPGSTAPPAHGVTSAPDTRPAPGSTAPPAHGVTSAPDTRPAL
GSTAPPVHNVTSASGSASGSASTLVHNGTSARATTTPASKSTPFSIPSHHSDTPTTLAS
HSTKTDASSTHHSSVPPLTSSNHSTSPQLSTGVSFFFLSFHISNLQFNSSLEDPSTDYY
QELQRDISEMFLQIYKQGGFLGLSNIKFRPGSVVVQLTLAFREGTINVHDVETQFNQYK
TEAASRYNLTISDVSVSDVPFPFSAQSGAGVPGWGIALLVLVCVLVALAIVYLIALAVCQ
CRRKNYGQLDIFPARDTYHPMSEYPTYHTHGRYVPPSSTDRSPYEKVSAGNGGSSLS
YTNPAVAAASANL
SEQ ID NO: 9-Plasmid 1112 ORF (TERT240)
atgggagctgccccggagccggagaggacccccgttggccagggatcgtgggcccatccgggacgcaccaggggac
catccgacaggggattctgtgtggtgtcaccggccaggccagcagaagaggcaaccagcctcgagggagcgttgtctg
gaaccagacattcccacccgtcggtgggccggcagcaccacgcgggaccaccgtccacttccagaccgccacggcca
tgggacaccccttgcccgcctgtgtatgccgagactaaacacttcctgtactcatccggagacaaggaacagcttcggccg
tccttcctcctgtcgtcgctcagaccgagcctgaccggagcacgcagattggtggaaactatcttccttgggtcacgtccgtg
gatgccaggtaccccacggcgcctcccgcgcctcccacagagatactggcagatgcggcctctgttcctggaattgctgg
gaaaccacgctcagtgcccgtacggagtcctgctcaagactcactgccctctgagggcggcggtcactccggcggccgg
agtgtgcgcacgggagaagccccagggaagcgtggcagctccggaagaggaggacaccgatccgcgccgcctcgtg
caacttctgcgccagcactcctcgccctggcaagtctacgggttcgtccgcgcctgcctgcgccgcctggtgccgcctggg
ctctggggttcccggcataacgagcgccgcttcctgagaaatactaagaagtttatctcacttggaaaacatgccaagttgt
cgctgcaagaactcacgtggaagatgtcagtccgcgattgcgcctggctgcgccgctcgccgggcgtcgggtgtgttcca
gctgcagaacaccgcctgagagaagaaattctggccaaatttctgcattggctgatgtcagtgtacgtggtcgagctgctgc
gctcctttttctacgtcactgagactacctttcaaaagaaccgcctgttcttctaccgcaaatctgtgtggagcaagctgcagtc
aatcggcattcgccagcatctgaagagggtgcagctgcgggaactttccgaggcagaagtccgccagcaccgggaggc
ccggccggcgcttctcacgtcgcgtctgagattcatcccaaagcccgacgggctgaggcctatcgtcaacatggattacgt
cgtgggcgctcgcacctttcgccgtgaaaagcgggccgaacgcttgacctcacgggtgaaggccctcttctccgtgctgaa
ctacgagagagcaagacggcctggcctgctgggagcttcggtgctgggactggacgatatccaccgggcttggcggacc
tttgttctccgggtgagagcccaagaccctccgccggaactgtacttcgtgaaggtggcgatcaccggagcctatgatacta
ttccgcaagatcgactcaccgaagtcatcgcctcgatcatcaaaccgcagaacacttactgcgtcaggcggtacgccgtg
gtccagaaggccgcgcatggccacgtgagaaaggcgttcaagtcgcacgtgtccactctcaccgacctccagccttacat
gaggcaattcgttgcgcatttgcaagagacttcgcccctgagagatgcggtggtcatcgagcagagctccagcctgaacg
aagcgagcagcggtctgtttgacgtgttcctccgcttcatgtgtcatcacgcggtgcgaatcaggggaaaatcatacgtgca
gtgccagggaatcccacaaggcagcattctgtcgactctcttgtgttccctttgctacggcgatatggaaaacaagctgttcg
ctgggatcagacgggacgggttgctgctcagactggtggacgacttcctgctggtgactccgcacctcactcacgccaaa
acctttctccgcactctggtgaggggagtgccagaatacggctgtgtggtcaatctccggaaaactgtggtgaatttccctgt
cgaggatgaggcactcggaggaaccgcatttgtccaaatgccagcacatggcctgttcccatggtgcggtctgctgctgga
cacccgaactcttgaagtgcagtccgactactccagctatgcccggacgagcatccgcgccagcctcactttcaatcgcg
gctttaaggccggacgaaacatgcgcagaaagcttttcggagtcctccggcttaaatgccattcgctctttctcgatctccaa
gtcaattcgctgcagaccgtgtgcacgaacatctacaagatcctgctgctccaagcctaccggttccacgcttgcgtgcttca
gctgccgtttcaccaacaggtgtggaagaacccgaccttctttctgcgggtcattagcgatactgcctccctgtgttactcaat
cctcaaggcaaagaacgccggaatgtcgctgggtgcgaaaggagccgcgggacctcttcctagcgaagcggtgcagt
ggctctgccaccaggctttcctcctgaagctgaccaggcacagagtgacctacgtcccgctgctgggctcgctgcgcactg
cacagacccagctgtctagaaaactccccggcaccaccctgaccgctctggaagccgccgccaacccagcattgccgt
cagatttcaagaccatcttggac
SEQ ID NO: 10-Plasmid 1112 Polypeptide (TERT240)
MGAAPEPERTPVGQGSWAHPGRTRGPSDRGFCWSPARPAEEATSLEGALSGTRHS
HPSVGRQHHAGPPSTSRPPRPWDTPCPPVYAETKHFLYSSGDKEQLRPSFLLSSLRP
SLTGARRLVETIFLGSRPWMPGTPRRLPRLPQRYWQMRPLFLELLGNHAQCPYGVLL
KTHCPLRAAVTPAAGVCAREKPQGSVAAPEEEDTDPRRLVQLLRQHSSPWQVYGFVR
ACLRRLVPPGLWGSRHNERRFLRNTKKFISLGKHAKLSLQELTWKMSVRDCAWLRRS
PGVGCVPAAEHRLREEILAKFLHWLMSVYVVELLRSFFYVTETTFQKNRLFFYRKSVW
SKLQSIGIRQHLKRVQLRELSEAEVRQHREARPALLTSRLRFIPKPDGLRPIVNMDYVV
GARTFRREKRAERLTSRVKALFSVLNYERARRPGLLGASVLGLDDIHRAWRTFVLRVR
AQDPPPELYFVKVAITGAYDTIPQDRLTEVIASIIKPQNTYCVRRYAVVQKAAHGHVRKA
FKSHVSTLTDLQPYMRQFVAHLQETSPLRDAVVIEQSSSLNEASSGLFDVFLRFMCHH
AVRIRGKSYVQCQGIPQGSILSTLLCSLCYGDMENKLFAGIRRDGLLLRLVDDFLLVTPH
LTHAKTFLRTLVRGVPEYGCVVNLRKTVVNFPVEDEALGGTAFVQMPAHGLFPWCGLL
LDTRTLEVQSDYSSYARTSIRASLTFNRGFKAGRNMRRKLFGVLRLKCHSLFLDLQVNS
LQTVCTNIYKILLLQAYRFHACVLQLPFHQQVVVKNPTFFLRVISDTASLCYSILKAKNAG
MSLGAKGAAGPLPSEAVQWLCHQAFLLKLTRHRVTYVPLLGSLRTAQTQLSRKLPGTT
LTALEAAANPALPSDFKTILD
SEQ ID NO: 11-Plasmid 1330 ORF (TERT541)
atggctagcgccaaatttctgcattggctgatgtcagtgtacgtggtcgagctgctgcgctcctttttctacgtcactgagactac
ctttcaaaagaaccgcctgttcttctaccgcaaatctgtgtggagcaagctgcagtcaatcggcattcgccagcatctgaag
agggtgcagctgcgggaactttccgaggcagaagtccgccagcaccgggaggcccggccggcgcttctcacgtcgcgt
ctgagattcatcccaaagcccgacgggctgaggcctatcgtcaacatggattacgtcgtgggcgctcgcacctttcgccgt
gaaaagcgggccgaacgcttgacctcacgggtgaaggccctcttctccgtgctgaactacgagagagcaagacggcct
ggcctgctgggagcttcggtgctgggactggacgatatccaccgggcttggcggacctttgttctccgggtgagagcccaa
gaccctccgccggaactgtacttcgtgaaggtggcgatcaccggagcctatgatactattccgcaagatcgactcaccga
agtcatcgcctcgatcatcaaaccgcagaacacttactgcgtcaggcggtacgccgtggtccagaaggccgcgcatggc
cacgtgagaaaggcgttcaagtcgcacgtgtccactctcaccgacctccagccttacatgaggcaattcgttgcgcatttgc
aagagacttcgcccctgagagatgcggtggtcatcgagcagagctccagcctgaacgaagcgagcagcggtctgtttga
cgtgttcctccgcttcatgtgtcatcacgcggtgcgaatcaggggaaaatcatacgtgcagtgccagggaatcccacaagg
cagcattctgtcgactctcttgtgttccctttgctacggcgatatggaaaacaagctgttcgctgggatcagacgggacgggtt
gctgctcagactggtggacgacttcctgctggtgactccgcacctcactcacgccaaaacctttctccgcactctggtgagg
ggagtgccagaatacggctgtgtggtcaatctccggaaaactgtggtgaatttccctgtcgaggatgaggcactcggagg
aaccgcatttgtccaaatgccagcacatggcctgttcccatggtgcggtctgctgctggacacccgaactcttgaagtgcag
tccgactactccagctatgcccggacgagcatccgcgccagcctcactttcaatcgcggctttaaggccggacgaaacat
gcgcagaaagcttttcggagtcctccggcttaaatgccattcgctctttctcgatctccaagtcaattcgctgcagaccgtgtg
cacgaacatctacaagatcctgctgctccaagcctaccggttccacgcttgcgtgcttcagctgccgtttcaccaacaggtgt
ggaagaacccgaccttctttctgcgggtcattagcgatactgcctccctgtgttactcaatcctcaaggcaaagaacgccgg
aatgtcgctgggtgcgaaaggagccgcgggacctcttcctagcgaagcggtgcagtggctctgccaccaggctttcctcct
gaagctgaccaggcacagagtgacctacgtcccgctgctgggctcgctgcgcactgcacagacccagctgtctagaaa
actccccggcaccaccctgaccgctctggaagccgccgccaacccagcattgccgtcagatttcaagaccatcttggac
SEQ ID NO: 12-Plasmid 1330 Polypeptide (TERT541)
MASAKFLHWLMSVYVVELLRSFFYVTETTFQKNRLFFYRKSVVVSKLQSIGIRQHLKRV
QLRELSEAEVRQHREARPALLTSRLRFIPKPDGLRPIVNMDYWGARTFRREKRAERLT
SRVKALFSVLNYERARRPGLLGASVLGLDDIHRAWRTFVLRVRAQDPPPELYFVKVAIT
GAYDTIPQDRLTEVIASIIKPQNTYCVRRYAVVQKAAHGHVRKAFKSHVSTLTDLQPYM
RQFVAHLQETSPLRDAVVIEQSSSLNEASSGLFDVFLRFMCHHAVRIRGKSYVQCQGIP
QGSILSTLLCSLCYGDMENKLFAGIRRDGLLLRLVDDFLLVTPHLTHAKTFLRTLVRGVP
EYGCVVNLRKTWNFPVEDEALGGTAFVQMPANGLFPWCGLLLDTRTLEVQSDYSSY
ARTSIRASLTFNRGFKAGRNMRRKLFGVLRLKCHSLFLDLQVNSLQTVCTNIYKILLLQA
YRFHACVLQLPFHQQVWKNPTFFLRVISDTASLCYSILKAKNAGMSLGAKGAAGPLPS
EAVQWLCHQAFLLKLTRHRVTYVPLLGSLRTAQTQLSRKLPGTTLTALEAAANPALPSD
FKTILD
SEQ ID NO: 13-Plasmid 1326 ORF (TERT343)
atggctagcttcctcctgtcgtcgctcagaccgagcctgaccggagcacgcagattggtggaaactatcttccttgggtcac
gtccgtggatgccaggtaccccacggcgcctcccgcgcctcccacagagatactggcagatgcggcctctgttcctggaa
ttgctgggaaaccacgctcagtgcccgtacggagtcctgctcaagactcactgccctctgagggcggcggtcactccggc
ggccggagtgtgcgcacgggagaagccccagggaagcgtggcagctccggaagaggaggacaccgatccgcgccg
cctcgtgcaacttctgcgccagcactcctcgccctggcaagtctacgggttcgtccgcgcctgcctgcgccgcctggtgccg
cctgggctctggggttcccggcataacgagcgccgcttcctgagaaatactaagaagtttatctcacttggaaaacatgcca
agttgtcgctgcaagaactcacgtggaagatgtcagtccgcgattgcgcctggctgcgccgctcgccgggcgtcgggtgtg
ttccagctgcagaacaccgcctgagagaagaaattctggccaaatttctgcattggctgatgtcagtgtacgtggtcgagct
gctgcgctcctttttctacgtcactgagactacctttcaaaagaaccgcctgttcttctaccgcaaatctgtgtggagcaagctg
cagtcaatcggcattcgccagcatctgaagagggtgcagctgcgggaactttccgaggcagaagtccgccagcaccgg
gaggcccggccggcgcttctcacgtcgcgtctgagattcatcccaaagcccgacgggctgaggcctatcgtcaacatgga
ttacgtcgtgggcgctcgcacctttcgccgtgaaaagcgggccgaacgcttgacctcacgggtgaaggccctcttctccgtg
ctgaactacgagagagcaagacggcctggcctgctgggagcttcggtgctgggactggacgatatccaccgggcttggc
ggacctttgttctccgggtgagagcccaagaccctccgccggaactgtacttcgtgaaggtggcgatcaccggagcctatg
atactattccgcaagatcgactcaccgaagtcatcgcctcgatcatcaaaccgcagaacacttactgcgtcaggcggtac
gccgtggtccagaaggccgcgcatggccacgtgagaaaggcgttcaagtcgcacgtgtccactctcaccgacctccagc
cttacatgaggcaattcgttgcgcatttgcaagagacttcgcccctgagagatgcggtggtcatcgagcagagctccagcct
gaacgaagcgagcagcggtctgtttgacgtgttcctccgcttcatgtgtcatcacgcggtgcgaatcaggggaaaatcata
cgtgcagtgccagggaatcccacaaggcagcattctgtcgactctcttgtgttccctttgctacggcgatatggaaaacaag
ctgttcgctgggatcagacgggacgggttgctgctcagactggtggacgacttcctgctggtgactccgcacctcactcacg
ccaaaacctttctccgcactctggtgaggggagtgccagaatacggctgtgtggtcaatctccggaaaactgtggtgaattt
ccctgtcgaggatgaggcactcggaggaaccgcatttgtccaaatgccagcacatggcctgttcccatggtgcggtctgct
gctggacacccgaactcttgaagtgcagtccgactactccagctatgcccggacgagcatccgcgccagcctcactttca
atcgcggctttaaggccggacgaaacatgcgcagaaagcttttcggagtcctccggcttaaatgccattcgctctttctcgat
ctccaagtcaattcgctgcagaccgtgtgcacgaacatctacaagatcctgctgctccaagcctaccggttccacgcttgcg
tgcttcagctgccgtttcaccaacaggtgtggaagaacccgaccttctttctgcgggtcattagcgatactgcctccctgtgtta
ctcaatcctcaaggcaaagaacgccggaatgtcgctgggtgcgaaaggagccgcgggacctcttcctagcgaagcggt
gcagtggctctgccaccaggctttcctcctgaagctgaccaggcacagagtgacctacgtcccgctgctgggctcgctgcg
cactgcacagacccagctgtctagaaaactccccggcaccaccctgaccgctctggaagccgccgccaacccagcatt
gccgtcagatttcaagaccatcttggac
SEQ ID NO: 14-Plasmid 1326 Polypeptide (TERT343)
MASFLLSSLRPSLTGARRLVETIFLGSRPWMPGTPRRLPRLPQRYWQMRPLFLELLGN
HAQCPYGVLLKTHCPLRAAVTPAAGVCAREKPQGSVAAPEEEDTDPRRLVQLLRQHS
SPWQVYGFVRACLRRLVPPGLWGSRHNERRFLRNTKKFISLGKHAKLSLQELTWKMS
VRDCAWLRRSPGVGCVPAAEHRLREEILAKFLHWLMSVYVVELLRSFFYVTETTFQKN
RLFFYRKSVVVSKLQSIGIRQHLKRVQLRELSEAEVRQHREARPALLTSRLRFIPKPDGL
RPIVNMDYVVGARTFRREKRAERLTSRVKALFSVLNYERARRPGLLGASVLGLDDIHR
AWRTFVLRVRAQDPPPELYFVKVAITGAYDTIPQDRLTEVIASIIKPQNTYCVRRYAVVQ
KAAHGHVRKAFKSHVSTLTDLQPYMRQFVAHLQETSPLRDAWIEQSSSLNEASSGLF
DVFLRFMCHHAVRIRGKSYVQCQGIPQGSILSTLLCSLCYGDMENKLFAGIRRDGLLLR
LVDDFLLVTPHLTHAKTFLRTLVRGVPEYGCVVNLRKTVVNFPVEDEALGGTAFVQMP
AHGLFPWCGLLLDTRTLEVQSDYSSYARTSIRASLTFNRGFKAGRNMRRKLFGVLRLK
CHSLFLDLQVNSLQTVCTNIYKILLLQAYRFHACVLQLPFHQQVWKNPTFFLRVISDTAS
LCYSILKAKNAGMSLGAKGAAGPLPSEAVQWLCHQAFLLKLTRHRVTYVPLLGSLRTA
QTQLSRKLPGTTLTALEAAANPALPSDFKTILD
SEQ ID NO: 15-Plasmid 1197 ORF (cMUC1)
atggctagcacaggctctggccacgccagctctacacctggcggcgagaaagagacaagcgccacccagagaagca
gcgtgccaagcagcaccgagaagaacgccgtgtccatgaccagctccgtgctgagcagccactctcctggcagcggca
gcagcacaacacagggccaggatgtgacactggcccctgccacagaacctgcctctggatctgccgccacctggggac
aggacgtgacaagcgtgccagtgaccagacctgccctgggctctacaacaccccctgcccacgatgtgaccagcgccc
ctgataacaagcctgcccctggaagcacagcccctccagctcatggcgtgacctctgccccagataccagaccagcccc
aggatctacagccccacccgcacacggcgtgacaagtgcccctgacacaagacccgctccaggctctactgctcctcct
gcccatggcgtgacaagcgctcccgatacaaggccagctcctggctccacagcaccaccagcacatggcgtgacatca
gctcccgacactagacctgctcccggatcaaccgctccaccagctcacggcgtgaccagcgcacctgataccagacctg
ctctgggaagcaccgcccctcccgtgcacaatgtgacatctgcttccggcagcgccagcggctctgcctctacactggtgc
acaacggcaccagcgccagagccacaacaaccccagccagcaagagcacccccttcagcatccctagccaccaca
gcgacacccctaccacactggccagccactccaccaagaccgatgcctctagcacccaccactccagcgtgccccctct
gaccagcagcaaccacagcacaagcccccagctgtctaccggcgtctcattcttctttctgtccttccacatcagcaacctg
cagttcaacagcagcctggaagatcccagcaccgactactaccaggaactgcagcgggatatcagcgagatgttcctgc
aaatctacaagcagggcggcttcctgggcctgagcaacatcaagttcagacccggcagcgtggtggtgcagctgaccct
ggctttccgggaaggcaccatcaacgtgcacgacgtggaaacccagttcaaccagtacaagaccgaggccgccagcc
ggtacaacctgaccatctccgatgtgtccgtgtccgacgtgcccttcccattctctgcccagtctggcgcaggcgtgccagg
atggggaattgctctgctggtgctcgtgtgcgtgctggtggccctggccatcgtgtatctgattgccctggccgtgtgccagtgc
cggcggaagaattacggccagctggacatcttccccgccagagacacctaccaccccatgagcgagtaccccacatac
cacacccacggcagatacgtgccacccagctccaccgacagatccccctacgagaaagtgtctgccggcaacggcgg
cagctccctgagctacacaaatcctgccgtggccgctgcctccgccaacctg
SEQ ID NO: 16-Plasmid 1197 Polypeptide) (cMUC1)
MASTGSGHASSTPGGEKETSATQRSSVPSSTEKNAVSMTSSVLSSHSPGSGSSTTQG
QDVTLAPATEPASGSAATWGQDVTSVPVTRPALGSTTPPAHDVTSAPDNKPAPGSTA
PPAHGVTSAPDTRPAPGSTAPPAHGVTSAPDTRPAPGSTAPPAHGVTSAPDTRPAPG
STAPPAHGVTSAPDTRPAPGSTAPPAHGVTSAPDTRPALGSTAPPVHNVTSASGSAS
GSASTLVHNGTSARATTTPASKSTPFSIPSHHSDTPTTLASHSTKTDASSTHHSSVPPL
TSSNHSTSPQLSTGVSFFFLSFHISNLQFNSSLEDPSTDYYQELQRDISEMFLQIYKQG
GFLGLSNIKFRPGSVVVQLTLAFREGTINVHDVETQFNQYKTEAASRYNLTISDVSVSD
VPFPFSAQSGAGVPGWGIALLVLVCVLVALAIVYLIALAVCQCRRKNYGQLDIFPARDTY
HPMSEYPTYHTHGRYVPPSSTDRSPYEKVSAGNGGSSLSYTNPAVAAASANL
SEQ ID NO: 17-Plasmid 1316 ORF
atggctagcctggctggcgagacaggacaggaagccgctcctctggacggcgtgctggccaaccctcccaatatcagc
agcctgagccccagacagctgctgggattcccttgtgccgaggtgtccggcctgagcacagagagagtgcgggaactgg
ctgtggccctggcccagaaaaacgtgaagctgagcaccgagcagctgcggtgcctggcccacagactgtctgagcctcc
cgaggatctggacgccctgcctctggatctgctgctgttcctgaaccccgacgccttcagcggacctcaggcctgcacccg
gttcttcagcagaatcaccaaggccaacgtggacctgctgcccagaggcgcccctgagagacagagactgctgcctgct
gctctggcctgttggggagtgcggggctctctgctgtctgaagctgatgtgcgggccctgggaggcctggcttgtgatctgcc
tggaagattcgtggccgagagcgccgaagtgctgctgcctagactggtgtcctgtcccggccctctggaccaggatcagc
aggaagctgccagagctgctctgcagggcggaggccctccttatggacctcctagcacttggagcgtgtccaccatggat
gccctgaggggcctgctgccagtgctgggccagcctatcatcagatccatcccacagggcatcgtggccgcctggcggc
agagaagctctagagatccctcttggcggcagcccgagcggacaatcctgcggcccaggtttcggagagaggtggaaa
agaccgcctgcccctctggcaagaaggccagagagatcgacgagagcctgatcttctacaagaagtgggagctggaa
gcctgcgtggacgccgctctgctggccacccagatggacagagtgaacgccatccccttcacctatgagcagctggacgt
gctgaagcacaagctggatgagctgtacccccagggctaccccgagagcgtgatccagcacctgggctacctgtttctga
agatgagccccgaggacatccggaagtggaacgtgaccagcctggaaaccctgaaggccctgctggaagtgaacaa
gggccacgagatgtccccccaggtggccacactgatcgacagattcgtgaagggcagaggccagctggacaaggaca
ccctggatacactgaccgccttctaccccggctatctgtgcagcctgtcccccgaggaactgagcagcgtgccacctagct
ctatctgggctgtgcggccccaggacctggatacctgcgatcctagacagctggatgtgctgtatcccaaggcccggctgg
ccttccagaacatgaacggcagcgagtacttcgtgaagatccagtccttcctgggcggagcccctaccgaggacctgaa
agctctgagccagcagaacgtgtccatggatctggccacctttatgaagctgcggaccgacgccgtgctgcctctgacagt
ggctgaggtgcagaaactgctgggcccccatgtggaagggctgaaggccgaagaacggcacagacccgtgcgcgac
tggatcctgaggcagagacaggatgacctggacacactgggcctgggactgcaggggggcatccctaatggctacctg
gtgctggacctgagcatgcaggaagccctgggatccggcagaatcttcaacgcccactacgccggctacttcgccgacct
gctgatccacgacatcgagacaaaccctggccccacccctggaacccagagccccttcttccttctgctgctgctgaccgt
gctgactgtcgtgacaggctctggccacgccagctctacacctggcggcgagaaagagacaagcgccacccagagaa
gcagcgtgccaagcagcaccgagaagaacgccgtgtccatgaccagctccgtgctgagcagccactctcctggcagcg
gcagcagcacaacacagggccaggatgtgacactggcccctgccacagaacctgcctctggatctgccgccacctggg
gacaggacgtgacaagcgtgccagtgaccagacctgccctgggctctacaacaccccctgcccacgatgtgaccagcg
cccctgataacaagcctgcccctggaagcacagcccctccagctcatggcgtgacctctgccccagataccagaccagc
cccaggatctacagccccacccgcacacggcgtgacaagtgcccctgacacaagacccgctccaggctctactgctcct
cctgcccatggcgtgacaagcgctcccgatacaaggccagctcctggctccacagcaccaccagcacatggcgtgaca
tcagctcccgacactagacctgctcccggatcaaccgctccaccagctcacggcgtgaccagcgcacctgataccagac
ctgctctgggaagcaccgcccctcccgtgcacaatgtgacatctgcttccggcagcgccagcggctctgcctctacactggt
gcacaacggcaccagcgccagagccacaacaaccccagccagcaagagcacccccttcagcatccctagccacca
cagcgacacccctaccacactggccagccactccaccaagaccgatgcctctagcacccaccactccagcgtgccccc
tctgaccagcagcaaccacagcacaagcccccagctgtctaccggcgtctcattcttctttctgtccttccacatcagcaacc
tgcagttcaacagcagcctggaagatcccagcaccgactactaccaggaactgcagcgggatatcagcgagatgttcct
gcaaatctacaagcagggcggcttcctgggcctgagcaacatcaagttcagacccggcagcgtggtggtgcagctgacc
ctggctttccgggaaggcaccatcaacgtgcacgacgtggaaacccagttcaaccagtacaagaccgaggccgccag
ccggtacaacctgaccatctccgatgtgtccgtgtccgacgtgcccttcccattctctgcccagtctggcgcaggcgtgccag
gatggggaattgctctgctggtgctcgtgtgcgtgctggtggccctggccatcgtgtatctgattgccctggccgtgtgccagt
gccggcggaagaattacggccagctggacatcttccccgccagagacacctaccaccccatgagcgagtaccccacat
accacacccacggcagatacgtgccacccagctccaccgacagatccccctacgagaaagtgtctgccggcaacggc
ggcagctccctgagctacacaaatcctgccgtggccgctgcctccgccaacctg
SEQ ID NO: 18-Plasmid 1316 Polypeptide
MASLAGETGQEAAPLDGVLANPPNISSLSPRQLLGFPCAEVSGLSTERVRELAVALAQ
KNVKLSTEQLRCLAHRLSEPPEDLDALPLDLLLFLNPDAFSGPQACTRFFSRITKANVDL
LPRGAPERQRLLPAALACWGVRGSLLSEADVRALGGLACDLPGRFVAESAEVLLPRLV
SCPGPLDQDQQEAARAALQGGGPPYGPPSTWSVSTMDALRGLLPVLGQPIIRSIPQGI
VAAWRQRSSRDPSWRQPERTILRPRFRREVEKTACPSGKKAREIDESLIFYKKWELEA
CVDAALLATQMDRVNAIPFTYEQLDVLKHKLDELYPQGYPESVIQHLGYLFLKMSPEDI
RKWNVTSLETLKALLEVNKGHEMSPQVATLIDRFVKGRGQLDKDTLDTLTAFYPGYLC
SLSPEELSSVPPSSIWAVRPQDLDTCDPRQLDVLYPKARLAFQNMNGSEYFVKIQSFL
GGAPTEDLKALSQQNVSMDLATFMKLRTDAVLPLTVAEVQKLLGPHVEGLKAEERHRP
VRDWILRQRQDDLDTLGLGLQGGIPNGYLVLDLSMQEALGSGRIFNAHYAGYFADLLIH
DIETNPGPTPGTQSPFFLLLLLTVLTVVTGSGHASSTPGGEKETSATQRSSVPSSTEKN
AVSMTSSVLSSHSPGSGSSTTQGQDVTLAPATEPASGSAATWGQDVTSVPVTRPALG
STTPPAHDVTSAPDNKPAPGSTAPPAHGVTSAPDTRPAPGSTAPPAHGVTSAPDTRP
APGSTAPPAHGVTSAPDTRPAPGSTAPPAHGVTSAPDTRPAPGSTAPPAHGVTSAPD
TRPALGSTAPPVHNVTSASGSASGSASTLVHNGTSARATTTPASKSTPFSIPSHHSDTP
TTLASHSTKTDASSTHHSSVPPLTSSNHSTSPQLSTGVSFFFLSFHISNLQFNSSLEDPS
TDYYQELQRDISEMFLQIYKQGGFLGLSNIKFRPGSVVVQLTLAFREGTINVHDVETQF
NQYKTEAASRYNLTISDVSVSDVPFPFSAQSGAGVPGWGIALLVLVCVLVALAIVYLIAL
AVCQCRRKNYGQLDIFPARDTYHPMSEYPTYHTHGRYVPPSSTDRSPYEKVSAGNGG
SSLSYTNPAVAAASANL
SEQ ID NO: 19-Plasmid 1313 ORF
atggctagcacccctggaacccagagccccttcttccttctgctgctgctgaccgtgctgactgtcgtgacaggctctggcca
cgccagctctacacctggcggcgagaaagagacaagcgccacccagagaagcagcgtgccaagcagcaccgaga
agaacgccgtgtccatgaccagctccgtgctgagcagccactctcctggcagcggcagcagcacaacacagggccag
gatgtgacactggcccctgccacagaacctgcctctggatctgccgccacctggggacaggacgtgacaagcgtgccag
tgaccagacctgccctgggctctacaacaccccctgcccacgatgtgaccagcgcccctgataacaagcctgcccctgg
aagcacagcccctccagctcatggcgtgacctctgccccagataccagaccagccccaggatctacagccccacccgc
acacggcgtgacaagtgcccctgacacaagacccgctccaggctctactgctcctcctgcccatggcgtgacaagcgctc
ccgatacaaggccagctcctggctccacagcaccaccagcacatggcgtgacatcagctcccgacactagacctgctcc
cggatcaaccgctccaccagctcacggcgtgaccagcgcacctgataccagacctgctctgggaagcaccgcccctcc
cgtgcacaatgtgacatctgcttccggcagcgccagcggctctgcctctacactggtgcacaacggcaccagcgccaga
gccacaacaaccccagccagcaagagcacccccttcagcatccctagccaccacagcgacacccctaccacactggc
cagccactccaccaagaccgatgcctctagcacccaccactccagcgtgccccctctgaccagcagcaaccacagcac
aagcccccagctgtctaccggcgtctcattcttctttctgtccttccacatcagcaacctgcagttcaacagcagcctggaag
atcccagcaccgactactaccaggaactgcagcgggatatcagcgagatgttcctgcaaatctacaagcagggcggctt
cctgggcctgagcaacatcaagttcagacccggcagcgtggtggtgcagctgaccctggctttccgggaaggcaccatc
aacgtgcacgacgtggaaacccagttcaaccagtacaagaccgaggccgccagccggtacaacctgaccatctccgat
gtgtccgtgtccgacgtgcccttcccattctctgcccagtctggcgcaggcgtgccaggatggggaattgctctgctggtgctc
gtgtgcgtgctggtggccctggccatcgtgtatctgattgccctggccgtgtgccagtgccggcggaagaattacggccagc
tggacatcttccccgccagagacacctaccaccccatgagcgagtaccccacataccacacccacggcagatacgtgc
cacccagctccaccgacagatccccctacgagaaagtgtctgccggcaacggcggcagctccctgagctacacaaatc
ctgccgtggccgctgcctccgccaacctgggatccggcagaatcttcaacgcccactacgccggctacttcgccgacctg
ctgatccacgacatcgagacaaaccctggccccctggctggcgagacaggacaggaagccgctcctctggacggcgtg
ctggccaaccctcccaatatcagcagcctgagccccagacagctgctgggattcccttgtgccgaggtgtccggcctgag
cacagagagagtgcgggaactggctgtggccctggcccagaaaaacgtgaagctgagcaccgagcagctgcggtgc
ctggcccacagactgtctgagcctcccgaggatctggacgccctgcctctggatctgctgctgttcctgaaccccgacgcctt
cagcggacctcaggcctgcacccggttcttcagcagaatcaccaaggccaacgtggacctgctgcccagaggcgcccc
tgagagacagagactgctgcctgctgctctggcctgttggggagtgcggggctctctgctgtctgaagctgatgtgcgggcc
ctgggaggcctggcttgtgatctgcctggaagattcgtggccgagagcgccgaagtgctgctgcctagactggtgtcctgtc
ccggccctctggaccaggatcagcaggaagctgccagagctgctctgcagggcggaggccctccttatggacctcctag
cacttggagcgtgtccaccatggatgccctgaggggcctgctgccagtgctgggccagcctatcatcagatccatcccaca
gggcatcgtggccgcctggcggcagagaagctctagagatccctcttggcggcagcccgagcggacaatcctgcggcc
caggtttcggagagaggtggaaaagaccgcctgcccctctggcaagaaggccagagagatcgacgagagcctgatctt
ctacaagaagtgggagctggaagcctgcgtggacgccgctctgctggccacccagatggacagagtgaacgccatccc
cttcacctatgagcagctggacgtgctgaagcacaagctggatgagctgtacccccagggctaccccgagagcgtgatc
cagcacctgggctacctgtttctgaagatgagccccgaggacatccggaagtggaacgtgaccagcctggaaaccctga
aggccctgctggaagtgaacaagggccacgagatgtccccccaggtggccacactgatcgacagattcgtgaagggca
gaggccagctggacaaggacaccctggatacactgaccgccttctaccccggctatctgtgcagcctgtcccccgagga
actgagcagcgtgccacctagctctatctgggctgtgcggccccaggacctggatacctgcgatcctagacagctggatgt
gctgtatcccaaggcccggctggccttccagaacatgaacggcagcgagtacttcgtgaagatccagtccttcctgggcg
gagcccctaccgaggacctgaaagctctgagccagcagaacgtgtccatggatctggccacctttatgaagctgcggac
cgacgccgtgctgcctctgacagtggctgaggtgcagaaactgctgggcccccatgtggaagggctgaaggccgaaga
acggcacagacccgtgcgcgactggatcctgaggcagagacaggatgacctggacacactgggcctgggactgcagg
ggggcatccctaatggctacctggtgctggacctgagcatgcaggaagccctg
SEQ ID NO: 20-Plasmid 1313 Polypeptide
MASTPGTQSPFFLLLLLTVLTVVTGSGHASSTPGGEKETSATQRSSVPSSTEKNAVSM
TSSVLSSHSPGSGSSTTQGQDVTLAPATEPASGSAATWGQDVTSVPVTRPALGSTTP
PAHDVTSAPDNKPAPGSTAPPAHGVTSAPDTRPAPGSTAPPAHGVTSAPDTRPAPGS
TAPPAHGVTSAPDTRPAPGSTAPPAHGVTSAPDTRPAPGSTAPPAHGVTSAPDTRPAL
GSTAPPVHNVTSASGSASGSASTLVHNGTSARATTTPASKSTPFSIPSHHSDTPTTLAS
HSTKTDASSTHHSSVPPLTSSNHSTSPQLSTGVSFFFLSFHISNLQFNSSLEDPSTDYY
QELQRDISEMFLQIYKQGGFLGLSNIKFRPGSWVQLTLAFREGTINVHDVETQFNQYK
TEAASRYNLTISDVSVSDVPFPFSAQSGAGVPGWGIALLVLVCVLVALAIVYLIALAVCQ
CRRKNYGQLDIFPARDTYHPMSEYPTYHTHGRYVPPSSTDRSPYEKVSAGNGGSSLS
YTNPAVAAASANLGSGRIFNAHYAGYFADLLIHDIETNPGPLAGETGQEAAPLDGVLAN
PPNISSLSPRQLLGFPCAEVSGLSTERVRELAVALAQKNVKLSTEQLRCLAHRLSEPPE
DLDALPLDLLLFLNPDAFSGPQACTRFFSRITKANVDLLPRGAPERQRLLPAALACWGV
RGSLLSEADVRALGGLACDLPGRFVAESAEVLLPRLVSCPGPLDQDQQEAARAALQG
GGPPYGPPSTWSVSTMDALRGLLPVLGQPIIRSIPQGIVAAWRQRSSRDPSWRQPERT
ILRPRFRREVEKTACPSGKKAREIDESLIFYKKWELEACVDAALLATQMDRVNAIPFTYE
QLDVLKHKLDELYPQGYPESVIQHLGYLFLKMSPEDIRKWNVTSLETLKALLEVNKGHE
MSPQVATLIDRFVKGRGQLDKDTLDTLTAFYPGYLCSLSPEELSSVPPSSIWAVRPQDL
DTCDPRQLDVLYPKARLAFQNMNGSEYFVKIQSFLGGAPTEDLKALSQQNVSMDLATF
MKLRTDAVLPLTVAEVQKLLGPHVEGLKAEERHRPVRDWILRQRQDDLDTLGLGLQG
GIPNGYLVLDLSMQEAL
SEQ ID NO: 21-Plasmid 1159 ORF
atggctagcacccctggaacccagagccccttcttccttctgctgctgctgaccgtgctgactgtcgtgacaggctctggcca
cgccagctctacacctggcggcgagaaagagacaagcgccacccagagaagcagcgtgccaagcagcaccgaga
agaacgccgtgtccatgaccagctccgtgctgagcagccactctcctggcagcggcagcagcacaacacagggccag
gatgtgacactggcccctgccacagaacctgcctctggatctgccgccacctggggacaggacgtgacaagcgtgccag
tgaccagacctgccctgggctctacaacaccccctgcccacgatgtgaccagcgcccctgataacaagcctgcccctgg
aagcacagcccctccagctcatggcgtgacctctgccccagataccagaccagccccaggatctacagccccacccgc
acacggcgtgacaagtgcccctgacacaagacccgctccaggctctactgctcctcctgcccatggcgtgacaagcgctc
ccgatacaaggccagctcctggctccacagcaccaccagcacatggcgtgacatcagctcccgacactagacctgctcc
cggatcaaccgctccaccagctcacggcgtgaccagcgcacctgataccagacctgctctgggaagcaccgcccctcc
cgtgcacaatgtgacatctgcttccggcagcgccagcggctctgcctctacactggtgcacaacggcaccagcgccaga
gccacaacaaccccagccagcaagagcacccccttcagcatccctagccaccacagcgacacccctaccacactggc
cagccactccaccaagaccgatgcctctagcacccaccactccagcgtgccccctctgaccagcagcaaccacagcac
aagcccccagctgtctaccggcgtctcattcttctttctgtccttccacatcagcaacctgcagttcaacagcagcctggaag
atcccagcaccgactactaccaggaactgcagcgggatatcagcgagatgttcctgcaaatctacaagcagggcggctt
cctgggcctgagcaacatcaagttcagacccggcagcgtggtggtgcagctgaccctggctttccgggaaggcaccatc
aacgtgcacgacgtggaaacccagttcaaccagtacaagaccgaggccgccagccggtacaacctgaccatctccgat
gtgtccgtgtccgacgtgcccttcccattctctgcccagtctggcgcaggcgtgccaggatggggaattgctctgctggtgctc
gtgtgcgtgctggtggccctggccatcgtgtatctgattgccctggccgtgtgccagtgccggcggaagaattacggccagc
tggacatcttccccgccagagacacctaccaccccatgagcgagtaccccacataccacacccacggcagatacgtgc
cacccagctccaccgacagatccccctacgagaaagtgtctgccggcaacggcggcagctccctgagctacacaaatc
ctgccgtggccgctgcctccgccaacctgggatccggcgccaccaatttcagcctgctgaaacaggccggcgacgtgga
agagaaccctggccctctggctggcgagacaggacaggaagccgctcctctggacggcgtgctggccaaccctcccaa
tatcagcagcctgagccccagacagctgctgggattcccttgtgccgaggtgtccggcctgagcacagagagagtgcgg
gaactggctgtggccctggcccagaaaaacgtgaagctgagcaccgagcagctgcggtgcctggcccacagactgtct
gagcctcccgaggatctggacgccctgcctctggatctgctgctgttcctgaaccccgacgccttcagcggacctcaggcct
gcacccggttcttcagcagaatcaccaaggccaacgtggacctgctgcccagaggcgcccctgagagacagagactgc
tgcctgctgctctggcctgttggggagtgcggggctctctgctgtctgaagctgatgtgcgggccctgggaggcctggcttgt
gatctgcctggaagattcgtggccgagagcgccgaagtgctgctgcctagactggtgtcctgtcccggccctctggaccag
gatcagcaggaagctgccagagctgctctgcagggcggaggccctccttatggacctcctagcacttggagcgtgtccac
catggatgccctgaggggcctgctgccagtgctgggccagcctatcatcagatccatcccacagggcatcgtggccgcct
ggcggcagagaagctctagagatccctcttggcggcagcccgagcggacaatcctgcggcccaggtttcggagagagg
tggaaaagaccgcctgcccctctggcaagaaggccagagagatcgacgagagcctgatcttctacaagaagtgggag
ctggaagcctgcgtggacgccgctctgctggccacccagatggacagagtgaacgccatccccttcacctatgagcagct
ggacgtgctgaagcacaagctggatgagctgtacccccagggctaccccgagagcgtgatccagcacctgggctacct
gtttctgaagatgagccccgaggacatccggaagtggaacgtgaccagcctggaaaccctgaaggccctgctggaagt
gaacaagggccacgagatgtccccccaggtggccacactgatcgacagattcgtgaagggcagaggccagctggaca
aggacaccctggatacactgaccgccttctaccccggctatctgtgcagcctgtcccccgaggaactgagcagcgtgcca
cctagctctatctgggctgtgcggccccaggacctggatacctgcgatcctagacagctggatgtgctgtatcccaaggccc
ggctggccttccagaacatgaacggcagcgagtacttcgtgaagatccagtccttcctgggcggagcccctaccgagga
cctgaaagctctgagccagcagaacgtgtccatggatctggccacctttatgaagctgcggaccgacgccgtgctgcctct
gacagtggctgaggtgcagaaactgctgggcccccatgtggaagggctgaaggccgaagaacggcacagacccgtg
cgcgactggatcctgaggcagagacaggatgacctggacacactgggcctgggactgcaggggggcatccctaatgg
ctacctggtgctggacctgagcatgcaggaagccctg
SEQ ID NO: 22-Plasmid 1159 Polypeptide
MASTPGTQSPFFLLLLLTVLTVVTGSGHASSTPGGEKETSATQRSSVPSSTEKNAVSM
TSSVLSSHSPGSGSSTTQGQDVTLAPATEPASGSAATWGQDVTSVPVTRPALGSTTP
PAHDVTSAPDNKPAPGSTAPPAHGVTSAPDTRPAPGSTAPPAHGVTSAPDTRPAPGS
TAPPAHGVTSAPDTRPAPGSTAPPAHGVTSAPDTRPAPGSTAPPAHGVTSAPDTRPAL
GSTAPPVHNVTSASGSASGSASTLVHNGTSARATTTPASKSTPFSIPSHHSDTPTTLAS
HSTKTDASSTHHSSVPPLTSSNHSTSPQLSTGVSFFFLSFHISNLQFNSSLEDPSTDYY
QELQRDISEMFLQIYKQGGFLGLSNIKFRPGSVVVQLTLAFREGTINVHDVETQFNQYK
TEAASRYNLTISDVSVSDVPFPFSAQSGAGVPGWGIALLVLVCVLVALAIVYLIALAVCQ
CRRKNYGQLDIFPARDTYHPMSEYPTYHTHGRYVPPSSTDRSPYEKVSAGNGGSSLS
YTNPAVAAASANLGSGATNFSLLKQAGDVEENPGPLAGETGQEAAPLDGVLANPPNIS
SLSPRQLLGFPCAEVSGLSTERVRELAVALAQKNVKLSTEQLRCLAHRLSEPPEDLDAL
PLDLLLFLNPDAFSGPQACTRFFSRITKANVDLLPRGAPERQRLLPAALACWGVRGSLL
SEADVRALGGLACDLPGRFVAESAEVLLPRLVSCPGPLDQDQQEAARAALQGGGPPY
GPPSTWSVSTMDALRGLLPVLGQPIIRSIPQGIVAAWRQRSSRDPSWRQPERTILRPRF
RREVEKTACPSGKKAREIDESLIFYKKWELEACVDAALLATQMDRVNAIPFTYEQLDVL
KHKLDELYPQGYPESVIQHLGYLFLKMSPEDIRKWNVTSLETLKALLEVNKGHEMSPQ
VATLIDRFVKGRGQLDKDTLDTLTAFYPGYLCSLSPEELSSVPPSSIWAVRPQDLDTCD
PRQLDVLYPKARLAFQNMNGSEYFVKIQSFLGGAPTEDLKALSQQNVSMDLATFMKLR
TDAVLPLTVAEVQKLLGPHVEGLKAEERHRPVRDWILRQRQDDLDTLGLGLQGGIPNG
YLVLDLSMQEAL
SEQ ID NO: 23-Plasmid 1158 ORF
atggctagcctggctggcgagacaggacaggaagccgctcctctggacggcgtgctggccaaccctcccaatatcagc
agcctgagccccagacagctgctgggattcccttgtgccgaggtgtccggcctgagcacagagagagtgcgggaactgg
ctgtggccctggcccagaaaaacgtgaagctgagcaccgagcagctgcggtgcctggcccacagactgtctgagcctcc
cgaggatctggacgccctgcctctggatctgctgctgttcctgaaccccgacgccttcagcggacctcaggcctgcacccg
gttcttcagcagaatcaccaaggccaacgtggacctgctgcccagaggcgcccctgagagacagagactgctgcctgct
gctctggcctgttggggagtgcggggctctctgctgtctgaagctgatgtgcgggccctgggaggcctggcttgtgatctgcc
tggaagattcgtggccgagagcgccgaagtgctgctgcctagactggtgtcctgtcccggccctctggaccaggatcagc
aggaagctgccagagctgctctgcagggcggaggccctccttatggacctcctagcacttggagcgtgtccaccatggat
gccctgaggggcctgctgccagtgctgggccagcctatcatcagatccatcccacagggcatcgtggccgcctggcggc
agagaagctctagagatccctcttggcggcagcccgagcggacaatcctgcggcccaggtttcggagagaggtggaaa
agaccgcctgcccctctggcaagaaggccagagagatcgacgagagcctgatcttctacaagaagtgggagctggaa
gcctgcgtggacgccgctctgctggccacccagatggacagagtgaacgccatccccttcacctatgagcagctggacgt
gctgaagcacaagctggatgagctgtacccccagggctaccccgagagcgtgatccagcacctgggctacctgtttctga
agatgagccccgaggacatccggaagtggaacgtgaccagcctggaaaccctgaaggccctgctggaagtgaacaa
gggccacgagatgtccccccaggtggccacactgatcgacagattcgtgaagggcagaggccagctggacaaggaca
ccctggatacactgaccgccttctaccccggctatctgtgcagcctgtcccccgaggaactgagcagcgtgccacctagct
ctatctgggctgtgcggccccaggacctggatacctgcgatcctagacagctggatgtgctgtatcccaaggcccggctgg
ccttccagaacatgaacggcagcgagtacttcgtgaagatccagtccttcctgggcggagcccctaccgaggacctgaa
agctctgagccagcagaacgtgtccatggatctggccacctttatgaagctgcggaccgacgccgtgctgcctctgacagt
ggctgaggtgcagaaactgctgggcccccatgtggaagggctgaaggccgaagaacggcacagacccgtgcgcgac
tggatcctgaggcagagacaggatgacctggacacactgggcctgggactgcaggggggcatccctaatggctacctg
gtgctggacctgagcatgcaggaagccctgggatccggcgccaccaatttcagcctgctgaaacaggccggcgacgtg
gaagagaaccctggccctacccctggaacccagagccccttcttccttctgctgctgctgaccgtgctgactgtcgtgacag
gctctggccacgccagctctacacctggcggcgagaaagagacaagcgccacccagagaagcagcgtgccaagca
gcaccgagaagaacgccgtgtccatgaccagctccgtgctgagcagccactctcctggcagcggcagcagcacaaca
cagggccaggatgtgacactggcccctgccacagaacctgcctctggatctgccgccacctggggacaggacgtgaca
agcgtgccagtgaccagacctgccctgggctctacaacaccccctgcccacgatgtgaccagcgcccctgataacaagc
ctgcccctggaagcacagcccctccagctcatggcgtgacctctgccccagataccagaccagccccaggatctacagc
cccacccgcacacggcgtgacaagtgcccctgacacaagacccgctccaggctctactgctcctcctgcccatggcgtg
acaagcgctcccgatacaaggccagctcctggctccacagcaccaccagcacatggcgtgacatcagctcccgacact
agacctgctcccggatcaaccgctccaccagctcacggcgtgaccagcgcacctgataccagacctgctctgggaagc
accgcccctcccgtgcacaatgtgacatctgcttccggcagcgccagcggctctgcctctacactggtgcacaacggcac
cagcgccagagccacaacaaccccagccagcaagagcacccccttcagcatccctagccaccacagcgacacccct
accacactggccagccactccaccaagaccgatgcctctagcacccaccactccagcgtgccccctctgaccagcagc
aaccacagcacaagcccccagctgtctaccggcgtctcattcttctttctgtccttccacatcagcaacctgcagttcaacag
cagcctggaagatcccagcaccgactactaccaggaactgcagcgggatatcagcgagatgttcctgcaaatctacaag
cagggcggcttcctgggcctgagcaacatcaagttcagacccggcagcgtggtggtgcagctgaccctggctttccggga
aggcaccatcaacgtgcacgacgtggaaacccagttcaaccagtacaagaccgaggccgccagccggtacaacctg
accatctccgatgtgtccgtgtccgacgtgcccttcccattctctgcccagtctggcgcaggcgtgccaggatggggaattgc
tctgctggtgctcgtgtgcgtgctggtggccctggccatcgtgtatctgattgccctggccgtgtgccagtgccggcggaaga
attacggccagctggacatcttccccgccagagacacctaccaccccatgagcgagtaccccacataccacacccacg
gcagatacgtgccacccagctccaccgacagatccccctacgagaaagtgtctgccggcaacggcggcagctccctga
gctacacaaatcctgccgtggccgctgcctccgccaacctg
SEQ ID NO: 24-Plasmid 1158 Polypeptide
MASLAGETGQEAAPLDGVLANPPNISSLSPRQLLGFPCAEVSGLSTERVRELAVALAQ
KNVKLSTEQLRCLAHRLSEPPEDLDALPLDLLLFLNPDAFSGPQACTRFFSRITKANVDL
LPRGAPERQRLLPAALACWGVRGSLLSEADVRALGGLACDLPGRFVAESAEVLLPRLV
SCPGPLDQDQQEAARAALQGGGPPYGPPSTWSVSTMDALRGLLPVLGQPIIRSIPQGI
VAAWRQRSSRDPSWRQPERTILRPRFRREVEKTACPSGKKAREIDESLIFYKKWELEA
CVDAALLATQMDRVNAIPFTYEQLDVLKHKLDELYPQGYPESVIQHLGYLFLKMSPEDI
RKWNVTSLETLKALLEVNKGHEMSPQVATLIDRFVKGRGQLDKDTLDTLTAFYPGYLC
SLSPEELSSVPPSSIWAVRPQDLDTCDPRQLDVLYPKARLAFQNMNGSEYFVKIQSFL
GGAPTEDLKALSQQNVSMDLATFMKLRTDAVLPLTVAEVQKLLGPHVEGLKAEERHRP
VRDWILRQRQDDLDTLGLGLQGGIPNGYLVLDLSMQEALGSGATNFSLLKQAGDVEEN
PGPTPGTQSPFFLLLLLTVLTVVTGSGHASSTPGGEKETSATQRSSVPSSTEKNAVSM
TSSVLSSHSPGSGSSTTQGQDVTLAPATEPASGSAATWGQDVTSVPVTRPALGSTTP
PAHDVTSAPDNKPAPGSTAPPAHGVTSAPDTRPAPGSTAPPAHGVTSAPDTRPAPGS
TAPPAHGVTSAPDTRPAPGSTAPPAHGVTSAPDTRPAPGSTAPPAHGVTSAPDTRPAL
GSTAPPVHNVTSASGSASGSASTLVHNGTSARATTTPASKSTPFSIPSHHSDTPTTLAS
HSTKTDASSTHHSSVPPLTSSNHSTSPQLSTGVSFFFLSFHISNLQFNSSLEDPSTDYY
QELQRDISEMFLQIYKQGGFLGLSNIKFRPGSWVQLTLAFREGTINVHDVETQFNQYK
TEAASRYNLTISDVSVSDVPFPFSAQSGAGVPGWGIALLVLVCVLVALAIVYLIALAVCQ
CRRKNYGQLDIFPARDTYHPMSEYPTYHTHGRYVPPSSTDRSPYEKVSAGNGGSSLS
YTNPAVAAASANL
SEQ ID NO: 25-Plasmid 1269 ORF
atggctagcacccctggaacccagagccccttcttccttctgctgctgctgaccgtgctgactgtcgtgacaggctctggcca
cgccagctctacacctggcggcgagaaagagacaagcgccacccagagaagcagcgtgccaagcagcaccgaga
agaacgccgtgtccatgaccagctccgtgctgagcagccactctcctggcagcggcagcagcacaacacagggccag
gatgtgacactggcccctgccacagaacctgcctctggatctgccgccacctggggacaggacgtgacaagcgtgccag
tgaccagacctgccctgggctctacaacaccccctgcccacgatgtgaccagcgcccctgataacaagcctgcccctgg
aagcacagcccctccagctcatggcgtgacctctgccccagataccagaccagccccaggatctacagccccacccgc
acacggcgtgacaagtgcccctgacacaagacccgctccaggctctactgctcctcctgcccatggcgtgacaagcgctc
ccgatacaaggccagctcctggctccacagcaccaccagcacatggcgtgacatcagctcccgacactagacctgctcc
cggatcaaccgctccaccagctcacggcgtgaccagcgcacctgataccagacctgctctgggaagcaccgcccctcc
cgtgcacaatgtgacatctgcttccggcagcgccagcggctctgcctctacactggtgcacaacggcaccagcgccaga
gccacaacaaccccagccagcaagagcacccccttcagcatccctagccaccacagcgacacccctaccacactggc
cagccactccaccaagaccgatgcctctagcacccaccactccagcgtgccccctctgaccagcagcaaccacagcac
aagcccccagctgtctaccggcgtctcattcttctttctgtccttccacatcagcaacctgcagttcaacagcagcctggaag
atcccagcaccgactactaccaggaactgcagcgggatatcagcgagatgttcctgcaaatctacaagcagggcggctt
cctgggcctgagcaacatcaagttcagacccggcagcgtggtggtgcagctgaccctggctttccgggaaggcaccatc
aacgtgcacgacgtggaaacccagttcaaccagtacaagaccgaggccgccagccggtacaacctgaccatctccgat
gtgtccgtgtccgacgtgcccttcccattctctgcccagtctggcgcaggcgtgccaggatggggaattgctctgctggtgctc
gtgtgcgtgctggtggccctggccatcgtgtatctgattgccctggccgtgtgccagtgccggcggaagaattacggccagc
tggacatcttccccgccagagacacctaccaccccatgagcgagtaccccacataccacacccacggcagatacgtgc
cacccagctccaccgacagatccccctacgagaaagtgtctgccggcaacggcggcagctccctgagctacacaaatc
ctgccgtggccgctgcctccgccaacctgggaggctccggcggaggagctgccccggagccggagaggacccccgtt
ggccagggatcgtgggcccatccgggacgcaccaggggaccatccgacaggggattctgtgtggtgtcaccggccagg
ccagcagaagaggcaaccagcctcgagggagcgttgtctggaaccagacattcccacccgtcggtgggccggcagca
ccacgcgggaccaccgtccacttccagaccgccacggccatgggacaccccttgcccgcctgtgtatgccgagactaaa
cacttcctgtactcatccggagacaaggaacagcttcggccgtccttcctcctgtcgtcgctcagaccgagcctgaccgga
gcacgcagattggtggaaactatcttccttgggtcacgtccgtggatgccaggtaccccacggcgcctcccgcgcctccca
cagagatactggcagatgcggcctctgttcctggaattgctgggaaaccacgctcagtgcccgtacggagtcctgctcaag
actcactgccctctgagggcggcggtcactccggcggccggagtgtgcgcacgggagaagccccagggaagcgtggc
agctccggaagaggaggacaccgatccgcgccgcctcgtgcaacttctgcgccagcactcctcgccctggcaagtctac
gggttcgtccgcgcctgcctgcgccgcctggtgccgcctgggctctggggttcccggcataacgagcgccgcttcctgaga
aatactaagaagtttatctcacttggaaaacatgccaagttgtcgctgcaagaactcacgtggaagatgtcagtccgcgatt
gcgcctggctgcgccgctcgccgggcgtcgggtgtgttccagctgcagaacaccgcctgagagaagaaattctggccaa
atttctgcattggctgatgtcagtgtacgtggtcgagctgctgcgctcctttttctacgtcactgagactacctttcaaaagaacc
gcctgttcttctaccgcaaatctgtgtggagcaagctgcagtcaatcggcattcgccagcatctgaagagggtgcagctgcg
ggaactttccgaggcagaagtccgccagcaccgggaggcccggccggcgcttctcacgtcgcgtctgagattcatccca
aagcccgacgggctgaggcctatcgtcaacatggattacgtcgtgggcgctcgcacctttcgccgtgaaaagcgggccg
aacgcttgacctcacgggtgaaggccctcttctccgtgctgaactacgagagagcaagacggcctggcctgctgggagct
tcggtgctgggactggacgatatccaccgggcttggcggacctttgttctccgggtgagagcccaagaccctccgccgga
actgtacttcgtgaaggtggcgatcaccggagcctatgatactattccgcaagatcgactcaccgaagtcatcgcctcgatc
atcaaaccgcagaacacttactgcgtcaggcggtacgccgtggtccagaaggccgcgcatggccacgtgagaaaggc
gttcaagtcgcacgtgtccactctcaccgacctccagccttacatgaggcaattcgttgcgcatttgcaagagacttcgcccc
tgagagatgcggtggtcatcgagcagagctccagcctgaacgaagcgagcagcggtctgtttgacgtgttcctccgcttca
tgtgtcatcacgcggtgcgaatcaggggaaaatcatacgtgcagtgccagggaatcccacaaggcagcattctgtcgact
ctcttgtgttccctttgctacggcgatatggaaaacaagctgttcgctgggatcagacgggacgggttgctgctcagactggt
ggacgacttcctgctggtgactccgcacctcactcacgccaaaacctttctccgcactctggtgaggggagtgccagaata
cggctgtgtggtcaatctccggaaaactgtggtgaatttccctgtcgaggatgaggcactcggaggaaccgcatttgtccaa
atgccagcacatggcctgttcccatggtgcggtctgctgctggacacccgaactcttgaagtgcagtccgactactccagct
atgcccggacgagcatccgcgccagcctcactttcaatcgcggctttaaggccggacgaaacatgcgcagaaagcttttc
ggagtcctccggcttaaatgccattcgctctttctcgatctccaagtcaattcgctgcagaccgtgtgcacgaacatctacaa
gatcctgctgctccaagcctaccggttccacgcttgcgtgcttcagctgccgtttcaccaacaggtgtggaagaacccgacc
ttctttctgcgggtcattagcgatactgcctccctgtgttactcaatcctcaaggcaaagaacgccggaatgtcgctgggtgcg
aaaggagccgcgggacctcttcctagcgaagcggtgcagtggctctgccaccaggctttcctcctgaagctgaccaggc
acagagtgacctacgtcccgctgctgggctcgctgcgcactgcacagacccagctgtctagaaaactccccggcaccac
cctgaccgctctggaagccgccgccaacccagcattgccgtcagatttcaagaccatcttggac
SEQ ID NO: 26-Plasmid 1269 Polypeptide
MASTPGTQSPFFLLLLLTVLTVVTGSGHASSTPGGEKETSATQRSSVPSSTEKNAVSM
TSSVLSSHSPGSGSSTTQGQDVTLAPATEPASGSAATWGQDVTSVPVTRPALGSTTP
PAHDVTSAPDNKPAPGSTAPPAHGVTSAPDTRPAPGSTAPPAHGVTSAPDTRPAPGS
TAPPAHGVTSAPDTRPAPGSTAPPAHGVTSAPDTRPAPGSTAPPAHGVTSAPDTRPAL
GSTAPPVHNVTSASGSASGSASTLVHNGTSARATTTPASKSTPFSIPSHHSDTPTTLAS
HSTKTDASSTHHSSVPPLTSSNHSTSPQLSTGVSFFFLSFHISNLQFNSSLEDPSTDYY
QELQRDISEMFLQIYKQGGFLGLSNIKFRPGSVVVQLTLAFREGTINVHDVETQFNQYK
TEAASRYNLTISDVSVSDVPFPFSAQSGAGVPGWGIALLVLVCVLVALAIVYLIALAVCQ
CRRKNYGQLDIFPARDTYHPMSEYPTYHTHGRYVPPSSTDRSPYEKVSAGNGGSSLS
YTNPAVAAASANLGGSGGGAAPEPERTPVGQGSWAHPGRTRGPSDRGFCWSPARP
AEEATSLEGALSGTRHSHPSVGRQHHAGPPSTSRPPRPWDTPCPPVYAETKHFLYSS
GDKEQLRPSFLLSSLRPSLTGARRLVETIFLGSRPWMPGTPRRLPRLPQRYWQMRPLF
LELLGNHAQCPYGVLLKTHCPLRAAVTPAAGVCAREKPQGSVAAPEEEDTDPRRLVQL
LRQHSSPWQVYGFVRACLRRLVPPGLWGSRHNERRFLRNTKKFISLGKHAKLSLQELT
WKMSVRDCAWLRRSPGVGCVPAAEHRLREEILAKFLHWLMSVYWELLRSFFYVTET
TFQKNRLFFYRKSVWSKLQSIGIRQHLKRVQLRELSEAEVRQHREARPALLTSRLRFIP
KPDGLRPIVNMDYVVGARTFRREKRAERLTSRVKALFSVLNYERARRPGLLGASVLGL
DDIHRAWRTFVLRVRAQDPPPELYFVKVAITGAYDTIPQDRLTEVIASIIKPQNTYCVRR
YAWQKAAHGHVRKAFKSHVSTLTDLQPYMRQFVAHLQETSPLRDAVVIEQSSSLNEA
SSGLFDVFLRFMCHHAVRIRGKSYVQCQGIPQGSILSTLLCSLCYGDMENKLFAGIRRD
GLLLRLVDDFLLVTPHLTHAKTFLRTLVRGVPEYGCVVNLRKT\NNFPVEDEALGGTAF
VQMPAHGLFPWCGLLLDTRTLEVQSDYSSYARTSIRASLTFNRGFKAGRNMRRKLFG
VLRLKCHSLFLDLQVNSLQTVCTNIYKILLLQAYRFHACVLQLPFHQQVVVKNPTFFLRVI
SDTASLCYSILKAKNAGMSLGAKGAAGPLPSEAVQWLCHQAFLLKLTRHRVTYVPLLG
SLRTAQTQLSRKLPGTTLTALEAAANPALPSDFKTILD
SEQ ID NO: 27-Plasmid 1270 ORF
atggctagcacccctggaacccagagccccttcttccttctgctgctgctgaccgtgctgactgtcgtgacaggctctggcca
cgccagctctacacctggcggcgagaaagagacaagcgccacccagagaagcagcgtgccaagcagcaccgaga
agaacgccgtgtccatgaccagctccgtgctgagcagccactctcctggcagcggcagcagcacaacacagggccag
gatgtgacactggcccctgccacagaacctgcctctggatctgccgccacctggggacaggacgtgacaagcgtgccag
tgaccagacctgccctgggctctacaacaccccctgcccacgatgtgaccagcgcccctgataacaagcctgcccctgg
aagcacagcccctccagctcatggcgtgacctctgccccagataccagaccagccccaggatctacagccccacccgc
acacggcgtgacaagtgcccctgacacaagacccgctccaggctctactgctcctcctgcccatggcgtgacaagcgctc
ccgatacaaggccagctcctggctccacagcaccaccagcacatggcgtgacatcagctcccgacactagacctgctcc
cggatcaaccgctccaccagctcacggcgtgaccagcgcacctgataccagacctgctctgggaagcaccgcccctcc
cgtgcacaatgtgacatctgcttccggcagcgccagcggctctgcctctacactggtgcacaacggcaccagcgccaga
gccacaacaaccccagccagcaagagcacccccttcagcatccctagccaccacagcgacacccctaccacactggc
cagccactccaccaagaccgatgcctctagcacccaccactccagcgtgccccctctgaccagcagcaaccacagcac
aagcccccagctgtctaccggcgtctcattcttctttctgtccttccacatcagcaacctgcagttcaacagcagcctggaag
atcccagcaccgactactaccaggaactgcagcgggatatcagcgagatgttcctgcaaatctacaagcagggcggctt
cctgggcctgagcaacatcaagttcagacccggcagcgtggtggtgcagctgaccctggctttccgggaaggcaccatc
aacgtgcacgacgtggaaacccagttcaaccagtacaagaccgaggccgccagccggtacaacctgaccatctccgat
gtgtccgtgtccgacgtgcccttcccattctctgcccagtctggcgcaggcgtgccaggatggggaattgctctgctggtgctc
gtgtgcgtgctggtggccctggccatcgtgtatctgattgccctggccgtgtgccagtgccggcggaagaattacggccagc
tggacatcttccccgccagagacacctaccaccccatgagcgagtaccccacataccacacccacggcagatacgtgc
cacccagctccaccgacagatccccctacgagaaagtgtctgccggcaacggcggcagctccctgagctacacaaatc
ctgccgtggccgctgcctccgccaacctgggatccggcacaatcctgtctgagggcgccaccaacttcagcctgctgaaa
ctggccggcgacgtggaactgaaccctggccctggagctgccccggagccggagaggacccccgttggccagggatc
gtgggcccatccgggacgcaccaggggaccatccgacaggggattctgtgtggtgtcaccggccaggccagcagaag
aggcaaccagcctcgagggagcgttgtctggaaccagacattcccacccgtcggtgggccggcagcaccacgcggga
ccaccgtccacttccagaccgccacggccatgggacaccccttgcccgcctgtgtatgccgagactaaacacttcctgtac
tcatccggagacaaggaacagcttcggccgtccttcctcctgtcgtcgctcagaccgagcctgaccggagcacgcagatt
ggtggaaactatcttccttgggtcacgtccgtggatgccaggtaccccacggcgcctcccgcgcctcccacagagatactg
gcagatgcggcctctgttcctggaattgctgggaaaccacgctcagtgcccgtacggagtcctgctcaagactcactgccct
ctgagggcggcggtcactccggcggccggagtgtgcgcacgggagaagccccagggaagcgtggcagctccggaag
aggaggacaccgatccgcgccgcctcgtgcaacttctgcgccagcactcctcgccctggcaagtctacgggttcgtccgc
gcctgcctgcgccgcctggtgccgcctgggctctggggttcccggcataacgagcgccgcttcctgagaaatactaagaa
gtttatctcacttggaaaacatgccaagttgtcgctgcaagaactcacgtggaagatgtcagtccgcgattgcgcctggctg
cgccgctcgccgggcgtcgggtgtgttccagctgcagaacaccgcctgagagaagaaattctggccaaatttctgcattgg
ctgatgtcagtgtacgtggtcgagctgctgcgctcctttttctacgtcactgagactacctttcaaaagaaccgcctgttcttcta
ccgcaaatctgtgtggagcaagctgcagtcaatcggcattcgccagcatctgaagagggtgcagctgcgggaactttccg
aggcagaagtccgccagcaccgggaggcccggccggcgcttctcacgtcgcgtctgagattcatcccaaagcccgacg
ggctgaggcctatcgtcaacatggattacgtcgtgggcgctcgcacctttcgccgtgaaaagcgggccgaacgcttgacct
cacgggtgaaggccctcttctccgtgctgaactacgagagagcaagacggcctggcctgctgggagcttcggtgctggga
ctggacgatatccaccgggcttggcggacctttgttctccgggtgagagcccaagaccctccgccggaactgtacttcgtg
aaggtggcgatcaccggagcctatgatactattccgcaagatcgactcaccgaagtcatcgcctcgatcatcaaaccgca
gaacacttactgcgtcaggcggtacgccgtggtccagaaggccgcgcatggccacgtgagaaaggcgttcaagtcgca
cgtgtccactctcaccgacctccagccttacatgaggcaattcgttgcgcatttgcaagagacttcgcccctgagagatgcg
gtggtcatcgagcagagctccagcctgaacgaagcgagcagcggtctgtttgacgtgttcctccgcttcatgtgtcatcacg
cggtgcgaatcaggggaaaatcatacgtgcagtgccagggaatcccacaaggcagcattctgtcgactctcttgtgttccct
ttgctacggcgatatggaaaacaagctgttcgctgggatcagacgggacgggttgctgctcagactggtggacgacttcct
gctggtgactccgcacctcactcacgccaaaacctttctccgcactctggtgaggggagtgccagaatacggctgtgtggt
caatctccggaaaactgtggtgaatttccctgtcgaggatgaggcactcggaggaaccgcatttgtccaaatgccagcac
atggcctgttcccatggtgcggtctgctgctggacacccgaactcttgaagtgcagtccgactactccagctatgcccggac
gagcatccgcgccagcctcactttcaatcgcggctttaaggccggacgaaacatgcgcagaaagcttttcggagtcctcc
ggcttaaatgccattcgctctttctcgatctccaagtcaattcgctgcagaccgtgtgcacgaacatctacaagatcctgctgc
tccaagcctaccggttccacgcttgcgtgcttcagctgccgtttcaccaacaggtgtggaagaacccgaccttctttctgcgg
gtcattagcgatactgcctccctgtgttactcaatcctcaaggcaaagaacgccggaatgtcgctgggtgcgaaaggagcc
gcgggacctcttcctagcgaagcggtgcagtggctctgccaccaggctttcctcctgaagctgaccaggcacagagtgac
ctacgtcccgctgctgggctcgctgcgcactgcacagacccagctgtctagaaaactccccggcaccaccctgaccgctc
tggaagccgccgccaacccagcattgccgtcagatttcaagaccatcttggac
SEQ ID NO: 28-Plasmid 1270 Polypeptide
MASTPGTQSPFFLLLLLTVLTVVTGSGHASSTPGGEKETSATQRSSVPSSTEKNAVSM
TSSVLSSHSPGSGSSTTQGQDVTLAPATEPASGSAATWGQDVTSVPVTRPALGSTTP
PAHDVTSAPDNKPAPGSTAPPAHGVTSAPDTRPAPGSTAPPAHGVTSAPDTRPAPGS
TAPPAHGVTSAPDTRPAPGSTAPPAHGVTSAPDTRPAPGSTAPPAHGVTSAPDTRPAL
GSTAPPVHNVTSASGSASGSASTLVHNGTSARATTTPASKSTPFSIPSHHSDTPTTLAS
HSTKTDASSTHHSSVPPLTSSNHSTSPQLSTGVSFFFLSFHISNLQFNSSLEDPSTDYY
QELQRDISEMFLQIYKQGGFLGLSNIKFRPGSVVVQLTLAFREGTINVHDVETQFNQYK
TEAASRYNLTISDVSVSDVPFPFSAQSGAGVPGWGIALLVLVCVLVALAIVYLIALAVCQ
CRRKNYGQLDIFPARDTYHPMSEYPTYHTHGRYVPPSSTDRSPYEKVSAGNGGSSLS
YTNPAVAAASANLGSGTILSEGATNFSLLKLAGDVELNPGPGAAPEPERTPVGQGSWA
HPGRTRGPSDRGFCWSPARPAEEATSLEGALSGTRHSHPSVGRQHHAGPPSTSRP
PRPWDTPCPPVYAETKHFLYSSGDKEQLRPSFLLSSLRPSLTGARRLVETIFLGSRPW
MPGTPRRLPRLPQRYWQMRPLFLELLGNHAQCPYGVLLKTHCPLRAAVTPAAGVCAR
EKPQGSVAAPEEEDTDPRRLVQLLRQHSSPWQVYGFVRACLRRLVPPGLWGSRHNE
RRFLRNTKKFISLGKHAKLSLQELTWKMSVRDCAWLRRSPGVGCVPAAEHRLREEILA
KFLHWLMSVYVVELLRSFFYVTETTFQKNRLFFYRKSVWSKLQSIGIRQHLKRVQLREL
SEAEVRQHREARPALLTSRLRFIPKPDGLRPIVNMDYVVGARTFRREKRAERLTSRVKA
LFSVLNYERARRPGLLGASVLGLDDIHRAWRTFVLRVRAQDPPPELYFVKVAITGAYDT
IPQDRLTEVIASIIKPQNTYCVRRYAVVQKAAHGHVRKAFKSHVSTLTDLQPYMRQFVA
HLQETSPLRDAVVIEQSSSLNEASSGLFDVFLRFMCHHAVRIRGKSYVQCQGIPQGSIL
STLLCSLCYGDMENKLFAGIRRDGLLLRLVDDFLLVTPHLTHAKTFLRTLVRGVPEYGC
WNLRKTWNFPVEDEALGGTAFVQMPANGLFPWCGLLLDTRTLEVQSDYSSYARTSI
RASLTFNRGFKAGRNMRRKLFGVLRLKCHSLFLDLQVNSLQTVCTNIYKILLLQAYRFH
ACVLQLPFHQQVWKNPTFFLRVISDTASLCYSILKAKNAGMSLGAKGAAGPLPSEAVQ
WLCHQAFLLKLTRHRVTYVPLLGSLRTAQTQLSRKLPGTTLTALEAAANPALPSDFKTIL
D
SEQ ID NO: 29-Plasmid 1271 ORF
atggctagcggagctgccccggagccggagaggacccccgttggccagggatcgtgggcccatccgggacgcacca
ggggaccatccgacaggggattctgtgtggtgtcaccggccaggccagcagaagaggcaaccagcctcgagggagc
gttgtctggaaccagacattcccacccgtcggtgggccggcagcaccacgcgggaccaccgtccacttccagaccgcca
cggccatgggacaccccttgcccgcctgtgtatgccgagactaaacacttcctgtactcatccggagacaaggaacagctt
cggccgtccttcctcctgtcgtcgctcagaccgagcctgaccggagcacgcagattggtggaaactatcttccttgggtcac
gtccgtggatgccaggtaccccacggcgcctcccgcgcctcccacagagatactggcagatgcggcctctgttcctggaa
ttgctgggaaaccacgctcagtgcccgtacggagtcctgctcaagactcactgccctctgagggcggcggtcactccggc
ggccggagtgtgcgcacgggagaagccccagggaagcgtggcagctccggaagaggaggacaccgatccgcgccg
cctcgtgcaacttctgcgccagcactcctcgccctggcaagtctacgggttcgtccgcgcctgcctgcgccgcctggtgccg
cctgggctctggggttcccggcataacgagcgccgcttcctgagaaatactaagaagtttatctcacttggaaaacatgcca
agttgtcgctgcaagaactcacgtggaagatgtcagtccgcgattgcgcctggctgcgccgctcgccgggcgtcgggtgtg
ttccagctgcagaacaccgcctgagagaagaaattctggccaaatttctgcattggctgatgtcagtgtacgtggtcgagct
gctgcgctcctttttctacgtcactgagactacctttcaaaagaaccgcctgttcttctaccgcaaatctgtgtggagcaagctg
cagtcaatcggcattcgccagcatctgaagagggtgcagctgcgggaactttccgaggcagaagtccgccagcaccgg
gaggcccggccggcgcttctcacgtcgcgtctgagattcatcccaaagcccgacgggctgaggcctatcgtcaacatgga
ttacgtcgtgggcgctcgcacctttcgccgtgaaaagcgggccgaacgcttgacctcacgggtgaaggccctcttctccgtg
ctgaactacgagagagcaagacggcctggcctgctgggagcttcggtgctgggactggacgatatccaccgggcttggc
ggacctttgttctccgggtgagagcccaagaccctccgccggaactgtacttcgtgaaggtggcgatcaccggagcctatg
atactattccgcaagatcgactcaccgaagtcatcgcctcgatcatcaaaccgcagaacacttactgcgtcaggcggtac
gccgtggtccagaaggccgcgcatggccacgtgagaaaggcgttcaagtcgcacgtgtccactctcaccgacctccagc
cttacatgaggcaattcgttgcgcatttgcaagagacttcgcccctgagagatgcggtggtcatcgagcagagctccagcct
gaacgaagcgagcagcggtctgtttgacgtgttcctccgcttcatgtgtcatcacgcggtgcgaatcaggggaaaatcata
cgtgcagtgccagggaatcccacaaggcagcattctgtcgactctcttgtgttccctttgctacggcgatatggaaaacaag
ctgttcgctgggatcagacgggacgggttgctgctcagactggtggacgacttcctgctggtgactccgcacctcactcacg
ccaaaacctttctccgcactctggtgaggggagtgccagaatacggctgtgtggtcaatctccggaaaactgtggtgaattt
ccctgtcgaggatgaggcactcggaggaaccgcatttgtccaaatgccagcacatggcctgttcccatggtgcggtctgct
gctggacacccgaactcttgaagtgcagtccgactactccagctatgcccggacgagcatccgcgccagcctcactttca
atcgcggctttaaggccggacgaaacatgcgcagaaagcttttcggagtcctccggcttaaatgccattcgctctttctcgat
ctccaagtcaattcgctgcagaccgtgtgcacgaacatctacaagatcctgctgctccaagcctaccggttccacgcttgcg
tgcttcagctgccgtttcaccaacaggtgtggaagaacccgaccttctttctgcgggtcattagcgatactgcctccctgtgtta
ctcaatcctcaaggcaaagaacgccggaatgtcgctgggtgcgaaaggagccgcgggacctcttcctagcgaagcggt
gcagtggctctgccaccaggctttcctcctgaagctgaccaggcacagagtgacctacgtcccgctgctgggctcgctgcg
cactgcacagacccagctgtctagaaaactccccggcaccaccctgaccgctctggaagccgccgccaacccagcatt
gccgtcagatttcaagaccatcttggacggatccggcacaatcctgtctgagggcgccaccaacttcagcctgctgaaact
ggccggcgacgtggaactgaaccctggccctacccctggaacccagagccccttcttccttctgctgctgctgaccgtgctg
actgtcgtgacaggctctggccacgccagctctacacctggcggcgagaaagagacaagcgccacccagagaagca
gcgtgccaagcagcaccgagaagaacgccgtgtccatgaccagctccgtgctgagcagccactctcctggcagcggca
gcagcacaacacagggccaggatgtgacactggcccctgccacagaacctgcctctggatctgccgccacctggggac
aggacgtgacaagcgtgccagtgaccagacctgccctgggctctacaacaccccctgcccacgatgtgaccagcgccc
ctgataacaagcctgcccctggaagcacagcccctccagctcatggcgtgacctctgccccagataccagaccagcccc
aggatctacagccccacccgcacacggcgtgacaagtgcccctgacacaagacccgctccaggctctactgctcctcct
gcccatggcgtgacaagcgctcccgatacaaggccagctcctggctccacagcaccaccagcacatggcgtgacatca
gctcccgacactagacctgctcccggatcaaccgctccaccagctcacggcgtgaccagcgcacctgataccagacctg
ctctgggaagcaccgcccctcccgtgcacaatgtgacatctgcttccggcagcgccagcggctctgcctctacactggtgc
acaacggcaccagcgccagagccacaacaaccccagccagcaagagcacccccttcagcatccctagccaccaca
gcgacacccctaccacactggccagccactccaccaagaccgatgcctctagcacccaccactccagcgtgccccctct
gaccagcagcaaccacagcacaagcccccagctgtctaccggcgtctcattcttctttctgtccttccacatcagcaacctg
cagttcaacagcagcctggaagatcccagcaccgactactaccaggaactgcagcgggatatcagcgagatgttcctgc
aaatctacaagcagggcggcttcctgggcctgagcaacatcaagttcagacccggcagcgtggtggtgcagctgaccct
ggctttccgggaaggcaccatcaacgtgcacgacgtggaaacccagttcaaccagtacaagaccgaggccgccagcc
ggtacaacctgaccatctccgatgtgtccgtgtccgacgtgcccttcccattctctgcccagtctggcgcaggcgtgccagg
atggggaattgctctgctggtgctcgtgtgcgtgctggtggccctggccatcgtgtatctgattgccctggccgtgtgccagtgc
cggcggaagaattacggccagctggacatcttccccgccagagacacctaccaccccatgagcgagtaccccacatac
cacacccacggcagatacgtgccacccagctccaccgacagatccccctacgagaaagtgtctgccggcaacggcgg
cagctccctgagctacacaaatcctgccgtggccgctgcctccgccaacctg
SEQ ID NO: 30-Plasmid 1271 Polypeptide
MASGAAPEPERTPVGQGSWAHPGRTRGPSDRGFCVVSPARPAEEATSLEGALSGTR
HSHPSVGRQHHAGPPSTSRPPRPWDTPCPPVYAETKHFLYSSGDKEQLRPSFLLSSL
RPSLTGARRLVETIFLGSRPWMPGTPRRLPRLPQRYWQMRPLFLELLGNHAQCPYGV
LLKTHCPLRAAVTPAAGVCAREKPQGSVAAPEEEDTDPRRLVQLLRQHSSPWQVYGF
VRACLRRLVPPGLWGSRHNERRFLRNTKKFISLGKHAKLSLQELTWKMSVRDCAWLR
RSPGVGCVPAAEHRLREElLAKFLHWLMSVYWELLRSFFYVTETTFQKNRLFFYRKSV
WSKLQSIGIRQHLKRVQLRELSEAEVRQHREARPALLTSRLRFIPKPDGLRPIVNMDYV
VGARTFRREKRAERLTSRVKALFSVLNYERARRPGLLGASVLGLDDIHRAWRTFVLRV
RAQDPPPELYFVKVAITGAYDTIPQDRLTEVIASIIKPQNTYCVRRYAWQKAAHGHVRK
AFKSHVSTLTDLQPYMRQFVAHLQETSPLRDAVVIEQSSSLNEASSGLFDVFLRFMCH
HAVRIRGKSYVQCQGIPQGSILSTLLCSLCYGDMENKLFAGIRRDGLLLRLVDDFLLVTP
HLTHAKTFLRTLVRGVPEYGCVVNLRKTVVNFPVEDEALGGTAFVQMPAHGLFPWCG
LLLDTRTLEVQSDYSSYARTSIRASLTFNRGFKAGRNMRRKLFGVLRLKCHSLFLDLQV
NSLQTVCTNIYKILLLQAYRFHACVLQLPFHQQVWKNPTFFLRVISDTASLCYSILKAKN
AGMSLGAKGAAGPLPSEAVQWLCHQAFLLKLTRHRVTYVPLLGSLRTAQTQLSRKLP
GTTLTALEAAANPALPSDFKTILDGSGTILSEGATNFSLLKLAGDVELNPGPTPGTQSPF
FLLLLLTVLTWTGSGHASSTPGGEKETSATQRSSVPSSTEKNAVSMTSSVLSSHSPG
SGSSTTQGQDVTLAPATEPASGSAATWGQDVTSVPVTRPALGSTTPPAHDVTSAPDN
KPAPGSTAPPAHGVTSAPDTRPAPGSTAPPAHGVTSAPDTRPAPGSTAPPAHGVTSA
PDTRPAPGSTAPPAHGVTSAPDTRPAPGSTAPPAHGVTSAPDTRPALGSTAPPVHNV
TSASGSASGSASTLVHNGTSARATTTPASKSTPFSIPSHHSDTPTTLASHSTKTDASST
HHSSVPPLTSSNHSTSPQLSTGVSFFFLSFHISNLQFNSSLEDPSTDYYQELQRDISEM
FLQIYKQGGFLGLSNIKFRPGSWVQLTLAFREGTINVHDVETQFNQYKTEAASRYNLTI
SDVSVSDVPFPFSAQSGAGVPGWGIALLVLVCVLVALAIVYLIALAVCQCRRKNYGQLD
IFPARDTYHPMSEYPTYHTHGRYVPPSSTDRSPYEKVSAGNGGSSLSYTNPAVAAASA
NL
SEQ ID NO: 31-Plasmid 1286 ORF
atggctagcacaggctctggccacgccagctctacacctggcggcgagaaagagacaagcgccacccagagaagca
gcgtgccaagcagcaccgagaagaacgccgtgtccatgaccagctccgtgctgagcagccactctcctggcagcggca
gcagcacaacacagggccaggatgtgacactggcccctgccacagaacctgcctctggatctgccgccacctggggac
aggacgtgacaagcgtgccagtgaccagacctgccctgggctctacaacaccccctgcccacgatgtgaccagcgccc
ctgataacaagcctgcccctggaagcacagcccctccagctcatggcgtgacctctgccccagataccagaccagcccc
aggatctacagccccacccgcacacggcgtgacaagtgcccctgacacaagacccgctccaggctctactgctcctcct
gcccatggcgtgacaagcgctcccgatacaaggccagctcctggctccacagcaccaccagcacatggcgtgacatca
gctcccgacactagacctgctcccggatcaaccgctccaccagctcacggcgtgaccagcgcacctgataccagacctg
ctctgggaagcaccgcccctcccgtgcacaatgtgacatctgcttccggcagcgccagcggctctgcctctacactggtgc
acaacggcaccagcgccagagccacaacaaccccagccagcaagagcacccccttcagcatccctagccaccaca
gcgacacccctaccacactggccagccactccaccaagaccgatgcctctagcacccaccactccagcgtgccccctct
gaccagcagcaaccacagcacaagcccccagctgtctaccggcgtctcattcttctttctgtccttccacatcagcaacctg
cagttcaacagcagcctggaagatcccagcaccgactactaccaggaactgcagcgggatatcagcgagatgttcctgc
aaatctacaagcagggcggcttcctgggcctgagcaacatcaagttcagacccggcagcgtggtggtgcagctgaccct
ggctttccgggaaggcaccatcaacgtgcacgacgtggaaacccagttcaaccagtacaagaccgaggccgccagcc
ggtacaacctgaccatctccgatgtgtccgtgtccgacgtgcccttcccattctctgcccagtctggcgcaggcgtgccagg
atggggaattgctctgctggtgctcgtgtgcgtgctggtggccctggccatcgtgtatctgattgccctggccgtgtgccagtgc
cggcggaagaattacggccagctggacatcttccccgccagagacacctaccaccccatgagcgagtaccccacatac
cacacccacggcagatacgtgccacccagctccaccgacagatccccctacgagaaagtgtctgccggcaacggcgg
cagctccctgagctacacaaatcctgccgtggccgctgcctccgccaacctgggatccggcacaatcctgtctgagggcg
ccaccaacttcagcctgctgaaactggccggcgacgtggaactgaaccctggccctggagctgccccggagccggaga
ggacccccgttggccagggatcgtgggcccatccgggacgcaccaggggaccatccgacaggggattctgtgtggtgtc
accggccaggccagcagaagaggcaaccagcctcgagggagcgttgtctggaaccagacattcccacccgtcggtgg
gccggcagcaccacgcgggaccaccgtccacttccagaccgccacggccatgggacaccccttgcccgcctgtgtatg
ccgagactaaacacttcctgtactcatccggagacaaggaacagcttcggccgtccttcctcctgtcgtcgctcagaccga
gcctgaccggagcacgcagattggtggaaactatcttccttgggtcacgtccgtggatgccaggtaccccacggcgcctcc
cgcgcctcccacagagatactggcagatgcggcctctgttcctggaattgctgggaaaccacgctcagtgcccgtacgga
gtcctgctcaagactcactgccctctgagggcggcggtcactccggcggccggagtgtgcgcacgggagaagccccag
ggaagcgtggcagctccggaagaggaggacaccgatccgcgccgcctcgtgcaacttctgcgccagcactcctcgccc
tggcaagtctacgggttcgtccgcgcctgcctgcgccgcctggtgccgcctgggctctggggttcccggcataacgagcgc
cgcttcctgagaaatactaagaagtttatctcacttggaaaacatgccaagttgtcgctgcaagaactcacgtggaagatgt
cagtccgcgattgcgcctggctgcgccgctcgccgggcgtcgggtgtgttccagctgcagaacaccgcctgagagaaga
aattctggccaaatttctgcattggctgatgtcagtgtacgtggtcgagctgctgcgctcctttttctacgtcactgagactaccttt
caaaagaaccgcctgttcttctaccgcaaatctgtgtggagcaagctgcagtcaatcggcattcgccagcatctgaagagg
gtgcagctgcgggaactttccgaggcagaagtccgccagcaccgggaggcccggccggcgcttctcacgtcgcgtctga
gattcatcccaaagcccgacgggctgaggcctatcgtcaacatggattacgtcgtgggcgctcgcacctttcgccgtgaaa
agcgggccgaacgcttgacctcacgggtgaaggccctcttctccgtgctgaactacgagagagcaagacggcctggcct
gctgggagcttcggtgctgggactggacgatatccaccgggcttggcggacctttgttctccgggtgagagcccaagaccc
tccgccggaactgtacttcgtgaaggtggcgatcaccggagcctatgatactattccgcaagatcgactcaccgaagtcat
cgcctcgatcatcaaaccgcagaacacttactgcgtcaggcggtacgccgtggtccagaaggccgcgcatggccacgtg
agaaaggcgttcaagtcgcacgtgtccactctcaccgacctccagccttacatgaggcaattcgttgcgcatttgcaagag
acttcgcccctgagagatgcggtggtcatcgagcagagctccagcctgaacgaagcgagcagcggtctgtttgacgtgttc
ctccgcttcatgtgtcatcacgcggtgcgaatcaggggaaaatcatacgtgcagtgccagggaatcccacaaggcagcat
tctgtcgactctcttgtgttccctttgctacggcgatatggaaaacaagctgttcgctgggatcagacgggacgggttgctgct
cagactggtggacgacttcctgctggtgactccgcacctcactcacgccaaaacctttctccgcactctggtgaggggagtg
ccagaatacggctgtgtggtcaatctccggaaaactgtggtgaatttccctgtcgaggatgaggcactcggaggaaccgc
atttgtccaaatgccagcacatggcctgttcccatggtgcggtctgctgctggacacccgaactcttgaagtgcagtccgact
actccagctatgcccggacgagcatccgcgccagcctcactttcaatcgcggctttaaggccggacgaaacatgcgcag
aaagcttttcggagtcctccggcttaaatgccattcgctctttctcgatctccaagtcaattcgctgcagaccgtgtgcacgaa
catctacaagatcctgctgctccaagcctaccggttccacgcttgcgtgcttcagctgccgtttcaccaacaggtgtggaaga
acccgaccttctttctgcgggtcattagcgatactgcctccctgtgttactcaatcctcaaggcaaagaacgccggaatgtcg
ctgggtgcgaaaggagccgcgggacctcttcctagcgaagcggtgcagtggctctgccaccaggctttcctcctgaagct
gaccaggcacagagtgacctacgtcccgctgctgggctcgctgcgcactgcacagacccagctgtctagaaaactcccc
ggcaccaccctgaccgctctggaagccgccgccaacccagcattgccgtcagatttcaagaccatcttggac
SEQ ID NO: 32-Plasmid 1286 Polypeptide
MASTGSGHASSTPGGEKETSATQRSSVPSSTEKNAVSMTSSVLSSHSPGSGSSTTQG
QDVTLAPATEPASGSAATWGQDVTSVPVTRPALGSTTPPAHDVTSAPDNKPAPGSTA
PPAHGVTSAPDTRPAPGSTAPPAHGVTSAPDTRPAPGSTAPPAHGVTSAPDTRPAPG
STAPPAHGVTSAPDTRPAPGSTAPPAHGVTSAPDTRPALGSTAPPVHNVTSASGSAS
GSASTLVHNGTSARATTTPASKSTPFSIPSHHSDTPTTLASHSTKTDASSTHHSSVPPL
TSSNHSTSPQLSTGVSFFFLSFHISNLQFNSSLEDPSTDYYQELQRDISEMFLQIYKQG
GFLGLSNIKFRPGSVVVQLTLAFREGTINVHDVETQFNQYKTEAASRYNLTISDVSVSD
VPFPFSAQSGAGVPGWGIALLVLVCVLVALAIVYLIALAVCQCRRKNYGQLDIFPARDTY
HPMSEYPTYHTHGRYVPPSSTDRSPYEKVSAGNGGSSLSYTNPAVAAASANLGSGTIL
SEGATNFSLLKLAGDVELNPGPGAAPEPERTPVGQGSWAHPGRTRGPSDRGFCWS
PARPAEEATSLEGALSGTRHSHPSVGRQHHAGPPSTSRPPRPWDTPCPPVYAETKHF
LYSSGDKEQLRPSFLLSSLRPSLTGARRLVETIFLGSRPWMPGTPRRLPRLPQRYVVQM
RPLFLELLGNHAQCPYGVLLKTHCPLRAAVTPAAGVCAREKPQGSVAAPEEEDTDPRR
LVQLLRQHSSPWQVYGFVRACLRRLVPPGLWGSRHNERRFLRNTKKFISLGKHAKLSL
QELTWKMSVRDCAWLRRSPGVGCVPAAEHRLREEILAKFLHWLMSVYVVELLRSFFY
VTETTFQKNRLFFYRKSVVVSKLQSIGIRQHLKRVQLRELSEAEVRQHREARPALLTSRL
RFIPKPDGLRPIVNMDYVVGARTFRREKRAERLTSRVKALFSVLNYERARRPGLLGASV
LGLDDIHRAWRTFVLRVRAQDPPPELYFVKVAITGAYDTIPQDRLTEVIASIIKPQNTYCV
RRYAVVQKAAHGHVRKAFKSHVSTLTDLQPYMRQFVAHLQETSPLRDAVVIEQSSSLN
EASSGLFDVFLRFMCHHAVRIRGKSYVQCQGIPQGSILSTLLCSLCYGDMENKLFAGIR
RDGLLLRLVDDFLLVTPHLTHAKTFLRTLVRGVPEYGCVVNLRKT\NNFPVEDEALGGT
AFVQMPAHGLFPWCGLLLDTRTLEVQSDYSSYARTSIRASLTFNRGFKAGRNMRRKLF
GVLRLKCHSLFLDLQVNSLQTVCTNIYKILLLQAYRFHACVLQLPFHQQVVVKNPTFFLR
VISDTASLCYSILKAKNAGMSLGAKGAAGPLPSEAVQWLCHQAFLLKLTRHRVTYVPLL
GSLRTAQTQLSRKLPGTTLTALEAAANPALPSDFKTILD
SEQ ID NO: 33-Plasmid 1287 ORF
atggctagcggagctgccccggagccggagaggacccccgttggccagggatcgtgggcccatccgggacgcacca
ggggaccatccgacaggggattctgtgtggtgtcaccggccaggccagcagaagaggcaaccagcctcgagggagc
gttgtctggaaccagacattcccacccgtcggtgggccggcagcaccacgcgggaccaccgtccacttccagaccgcca
cggccatgggacaccccttgcccgcctgtgtatgccgagactaaacacttcctgtactcatccggagacaaggaacagctt
cggccgtccttcctcctgtcgtcgctcagaccgagcctgaccggagcacgcagattggtggaaactatcttccttgggtcac
gtccgtggatgccaggtaccccacggcgcctcccgcgcctcccacagagatactggcagatgcggcctctgttcctggaa
ttgctgggaaaccacgctcagtgcccgtacggagtcctgctcaagactcactgccctctgagggcggcggtcactccggc
ggccggagtgtgcgcacgggagaagccccagggaagcgtggcagctccggaagaggaggacaccgatccgcgccg
cctcgtgcaacttctgcgccagcactcctcgccctggcaagtctacgggttcgtccgcgcctgcctgcgccgcctggtgccg
cctgggctctggggttcccggcataacgagcgccgcttcctgagaaatactaagaagtttatctcacttggaaaacatgcca
agttgtcgctgcaagaactcacgtggaagatgtcagtccgcgattgcgcctggctgcgccgctcgccgggcgtcgggtgtg
ttccagctgcagaacaccgcctgagagaagaaattctggccaaatttctgcattggctgatgtcagtgtacgtggtcgagct
gctgcgctcctttttctacgtcactgagactacctttcaaaagaaccgcctgttcttctaccgcaaatctgtgtggagcaagctg
cagtcaatcggcattcgccagcatctgaagagggtgcagctgcgggaactttccgaggcagaagtccgccagcaccgg
gaggcccggccggcgcttctcacgtcgcgtctgagattcatcccaaagcccgacgggctgaggcctatcgtcaacatgga
ttacgtcgtgggcgctcgcacctttcgccgtgaaaagcgggccgaacgcttgacctcacgggtgaaggccctcttctccgtg
ctgaactacgagagagcaagacggcctggcctgctgggagcttcggtgctgggactggacgatatccaccgggcttggc
ggacctttgttctccgggtgagagcccaagaccctccgccggaactgtacttcgtgaaggtggcgatcaccggagcctatg
atactattccgcaagatcgactcaccgaagtcatcgcctcgatcatcaaaccgcagaacacttactgcgtcaggcggtac
gccgtggtccagaaggccgcgcatggccacgtgagaaaggcgttcaagtcgcacgtgtccactctcaccgacctccagc
cttacatgaggcaattcgttgcgcatttgcaagagacttcgcccctgagagatgcggtggtcatcgagcagagctccagcct
gaacgaagcgagcagcggtctgtttgacgtgttcctccgcttcatgtgtcatcacgcggtgcgaatcaggggaaaatcata
cgtgcagtgccagggaatcccacaaggcagcattctgtcgactctcttgtgttccctttgctacggcgatatggaaaacaag
ctgttcgctgggatcagacgggacgggttgctgctcagactggtggacgacttcctgctggtgactccgcacctcactcacg
ccaaaacctttctccgcactctggtgaggggagtgccagaatacggctgtgtggtcaatctccggaaaactgtggtgaattt
ccctgtcgaggatgaggcactcggaggaaccgcatttgtccaaatgccagcacatggcctgttcccatggtgcggtctgct
gctggacacccgaactcttgaagtgcagtccgactactccagctatgcccggacgagcatccgcgccagcctcactttca
atcgcggctttaaggccggacgaaacatgcgcagaaagcttttcggagtcctccggcttaaatgccattcgctctttctcgat
ctccaagtcaattcgctgcagaccgtgtgcacgaacatctacaagatcctgctgctccaagcctaccggttccacgcttgcg
tgcttcagctgccgtttcaccaacaggtgtggaagaacccgaccttctttctgcgggtcattagcgatactgcctccctgtgtta
ctcaatcctcaaggcaaagaacgccggaatgtcgctgggtgcgaaaggagccgcgggacctcttcctagcgaagcggt
gcagtggctctgccaccaggctttcctcctgaagctgaccaggcacagagtgacctacgtcccgctgctgggctcgctgcg
cactgcacagacccagctgtctagaaaactccccggcaccaccctgaccgctctggaagccgccgccaacccagcatt
gccgtcagatttcaagaccatcttggacggatccggcacaatcctgtctgagggcgccaccaacttcagcctgctgaaact
ggccggcgacgtggaactgaaccctggccctacaggctctggccacgccagctctacacctggcggcgagaaagaga
caagcgccacccagagaagcagcgtgccaagcagcaccgagaagaacgccgtgtccatgaccagctccgtgctgag
cagccactctcctggcagcggcagcagcacaacacagggccaggatgtgacactggcccctgccacagaacctgcct
ctggatctgccgccacctggggacaggacgtgacaagcgtgccagtgaccagacctgccctgggctctacaacacccc
ctgcccacgatgtgaccagcgcccctgataacaagcctgcccctggaagcacagcccctccagctcatggcgtgacctct
gccccagataccagaccagccccaggatctacagccccacccgcacacggcgtgacaagtgcccctgacacaagac
ccgctccaggctctactgctcctcctgcccatggcgtgacaagcgctcccgatacaaggccagctcctggctccacagca
ccaccagcacatggcgtgacatcagctcccgacactagacctgctcccggatcaaccgctccaccagctcacggcgtga
ccagcgcacctgataccagacctgctctgggaagcaccgcccctcccgtgcacaatgtgacatctgcttccggcagcgcc
agcggctctgcctctacactggtgcacaacggcaccagcgccagagccacaacaaccccagccagcaagagcaccc
ccttcagcatccctagccaccacagcgacacccctaccacactggccagccactccaccaagaccgatgcctctagcac
ccaccactccagcgtgccccctctgaccagcagcaaccacagcacaagcccccagctgtctaccggcgtctcattcttcttt
ctgtccttccacatcagcaacctgcagttcaacagcagcctggaagatcccagcaccgactactaccaggaactgcagc
gggatatcagcgagatgttcctgcaaatctacaagcagggcggcttcctgggcctgagcaacatcaagttcagacccggc
agcgtggtggtgcagctgaccctggctttccgggaaggcaccatcaacgtgcacgacgtggaaacccagttcaaccagt
acaagaccgaggccgccagccggtacaacctgaccatctccgatgtgtccgtgtccgacgtgcccttcccattctctgccc
agtctggcgcaggcgtgccaggatggggaattgctctgctggtgctcgtgtgcgtgctggtggccctggccatcgtgtatctg
attgccctggccgtgtgccagtgccggcggaagaattacggccagctggacatcttccccgccagagacacctaccacc
ccatgagcgagtaccccacataccacacccacggcagatacgtgccacccagctccaccgacagatccccctacgag
aaagtgtctgccggcaacggcggcagctccctgagctacacaaatcctgccgtggccgctgcctccgccaacctg
SEQ ID NO: 34-Plasmid 1287 Polypeptide
MASGAAPEPERTPVGQGSWAHPGRTRGPSDRGFCVVSPARPAEEATSLEGALSGTR
HSHPSVGRQHHAGPPSTSRPPRPWDTPCPPVYAETKHFLYSSGDKEQLRPSFLLSSL
RPSLTGARRLVETIFLGSRPWMPGTPRRLPRLPQRYWQMRPLFLELLGNHAQCPYGV
LLKTHCPLRAAVTPAAGVCAREKPQGSVAAPEEEDTDPRRLVQLLRQHSSPWQVYGF
VRACLRRLVPPGLWGSRHNERRFLRNTKKFISLGKHAKLSLQELTWKMSVRDCAWLR
RSPGVGCVPAAEHRLREElLAKFLHWLMSVYVVELLRSFFYVTETTFQKNRLFFYRKSV
WSKLQSIGIRQHLKRVQLRELSEAEVRQHREARPALLTSRLRFIPKPDGLRPIVNMDYV
VGARTFRREKRAERLTSRVKALFSVLNYERARRPGLLGASVLGLDDIHRAWRTFVLRV
RAQDPPPELYFVKVAITGAYDTIPQDRLTEVIASIIKPQNTYCVRRYAVVQKAAHGHVRK
AFKSHVSTLTDLQPYMRQFVAHLQETSPLRDAVVIEQSSSLNEASSGLFDVFLRFMCH
HAVRIRGKSYVQCQGIPQGSILSTLLCSLCYGDMENKLFAGIRRDGLLLRLVDDFLLVTP
HLTHAKTFLRTLVRGVPEYGCVVNLRKTVVNFPVEDEALGGTAFVQMPANGLFPWCG
LLLDTRTLEVQSDYSSYARTSIRASLTFNRGFKAGRNMRRKLFGVLRLKCHSLFLDLQV
NSLQTVCTNIYKILLLQAYRFHACVLQLPFHQQVWKNPTFFLRVISDTASLCYSILKAKN
AGMSLGAKGAAGPLPSEAVQWLCHQAFLLKLTRHRVTYVPLLGSLRTAQTQLSRKLP
GTTLTALEAAANPALPSDFKTILDGSGTILSEGATNFSLLKLAGDVELNPGPTGSGHASS
TPGGEKETSATQRSSVPSSTEKNAVSMTSSVLSSHSPGSGSSTTQGQDVTLAPATEP
ASGSAATWGQDVTSVPVTRPALGSTTPPAHDVTSAPDNKPAPGSTAPPAHGVTSAPD
TRPAPGSTAPPAHGVTSAPDTRPAPGSTAPPAHGVTSAPDTRPAPGSTAPPAHGVTS
APDTRPAPGSTAPPAHGVTSAPDTRPALGSTAPPVHNVTSASGSASGSASTLVHNGT
SARATTTPASKSTPFSIFSHHSDTPTTLASHSTKTDASSTHHSSVPPLTSSNHSTSPQL
STGVSFFFLSFHISNLQFNSSLEDPSTDYYQELQRDISEMFLQIYKQGGFLGLSNIKFRP
GSVVVQLTLAFREGTINVHDVETQFNQYKTEAASRYNLTISDVSVSDVPFPFSAQSGAG
VPGWGIALLVLVCVLVALAIVYLIALAVCQCRRKNYGQLDIFPARDTYHPMSEYPTYHTH
GRYVPPSSTDRSPYEKVSAGNGGSSLSYTNPAVAAASANL
SEQ ID NO: 35 -Plasmid 1272 ORF
atggctagcggagctgccccggagccggagaggacccccgttggccagggatcgtgggcccatccgggacgcacca
ggggaccatccgacaggggattctgtgtggtgtcaccggccaggccagcagaagaggcaaccagcctcgagggagc
gttgtctggaaccagacattcccacccgtcggtgggccggcagcaccacgcgggaccaccgtccacttccagaccgcca
cggccatgggacaccccttgcccgcctgtgtatgccgagactaaacacttcctgtactcatccggagacaaggaacagctt
cggccgtccttcctcctgtcgtcgctcagaccgagcctgaccggagcacgcagattggtggaaactatcttccttgggtcac
gtccgtggatgccaggtaccccacggcgcctcccgcgcctcccacagagatactggcagatgcggcctctgttcctggaa
ttgctgggaaaccacgctcagtgcccgtacggagtcctgctcaagactcactgccctctgagggcggcggtcactccggc
ggccggagtgtgcgcacgggagaagccccagggaagcgtggcagctccggaagaggaggacaccgatccgcgccg
cctcgtgcaacttctgcgccagcactcctcgccctggcaagtctacgggttcgtccgcgcctgcctgcgccgcctggtgccg
cctgggctctggggttcccggcataacgagcgccgcttcctgagaaatactaagaagtttatctcacttggaaaacatgcca
agttgtcgctgcaagaactcacgtggaagatgtcagtccgcgattgcgcctggctgcgccgctcgccgggcgtcgggtgtg
ttccagctgcagaacaccgcctgagagaagaaattctggccaaatttctgcattggctgatgtcagtgtacgtggtcgagct
gctgcgctcctttttctacgtcactgagactacctttcaaaagaaccgcctgttcttctaccgcaaatctgtgtggagcaagctg
cagtcaatcggcattcgccagcatctgaagagggtgcagctgcgggaactttccgaggcagaagtccgccagcaccgg
gaggcccggccggcgcttctcacgtcgcgtctgagattcatcccaaagcccgacgggctgaggcctatcgtcaacatgga
ttacgtcgtgggcgctcgcacctttcgccgtgaaaagcgggccgaacgcttgacctcacgggtgaaggccctcttctccgtg
ctgaactacgagagagcaagacggcctggcctgctgggagcttcggtgctgggactggacgatatccaccgggcttggc
ggacctttgttctccgggtgagagcccaagaccctccgccggaactgtacttcgtgaaggtggcgatcaccggagcctatg
atactattccgcaagatcgactcaccgaagtcatcgcctcgatcatcaaaccgcagaacacttactgcgtcaggcggtac
gccgtggtccagaaggccgcgcatggccacgtgagaaaggcgttcaagtcgcacgtgtccactctcaccgacctccagc
cttacatgaggcaattcgttgcgcatttgcaagagacttcgcccctgagagatgcggtggtcatcgagcagagctccagcct
gaacgaagcgagcagcggtctgtttgacgtgttcctccgcttcatgtgtcatcacgcggtgcgaatcaggggaaaatcata
cgtgcagtgccagggaatcccacaaggcagcattctgtcgactctcttgtgttccctttgctacggcgatatggaaaacaag
ctgttcgctgggatcagacgggacgggttgctgctcagactggtggacgacttcctgctggtgactccgcacctcactcacg
ccaaaacctttctccgcactctggtgaggggagtgccagaatacggctgtgtggtcaatctccggaaaactgtggtgaattt
ccctgtcgaggatgaggcactcggaggaaccgcatttgtccaaatgccagcacatggcctgttcccatggtgcggtctgct
gctggacacccgaactcttgaagtgcagtccgactactccagctatgcccggacgagcatccgcgccagcctcactttca
atcgcggctttaaggccggacgaaacatgcgcagaaagcttttcggagtcctccggcttaaatgccattcgctctttctcgat
ctccaagtcaattcgctgcagaccgtgtgcacgaacatctacaagatcctgctgctccaagcctaccggttccacgcttgcg
tgcttcagctgccgtttcaccaacaggtgtggaagaacccgaccttctttctgcgggtcattagcgatactgcctccctgtgtta
ctcaatcctcaaggcaaagaacgccggaatgtcgctgggtgcgaaaggagccgcgggacctcttcctagcgaagcggt
gcagtggctctgccaccaggctttcctcctgaagctgaccaggcacagagtgacctacgtcccgctgctgggctcgctgcg
cactgcacagacccagctgtctagaaaactccccggcaccaccctgaccgctctggaagccgccgccaacccagcatt
gccgtcagatttcaagaccatcttggacggatccggcgagggcagaggcagcctgctgacatgtggcgacgtggaaga
gaaccctggccccctggctggcgagacaggacaggaagccgctcctctggacggcgtgctggccaaccctcccaatat
cagcagcctgagccccagacagctgctgggattcccttgtgccgaggtgtccggcctgagcacagagagagtgcggga
actggctgtggccctggcccagaaaaacgtgaagctgagcaccgagcagctgcggtgcctggcccacagactgtctga
gcctcccgaggatctggacgccctgcctctggatctgctgctgttcctgaaccccgacgccttcagcggacctcaggcctgc
acccggttcttcagcagaatcaccaaggccaacgtggacctgctgcccagaggcgcccctgagagacagagactgctg
cctgctgctctggcctgttggggagtgcggggctctctgctgtctgaagctgatgtgcgggccctgggaggcctggcttgtga
tctgcctggaagattcgtggccgagagcgccgaagtgctgctgcctagactggtgtcctgtcccggccctctggaccagga
tcagcaggaagctgccagagctgctctgcagggcggaggccctccttatggacctcctagcacttggagcgtgtccacca
tggatgccctgaggggcctgctgccagtgctgggccagcctatcatcagatccatcccacagggcatcgtggccgcctgg
cggcagagaagctctagagatccctcttggcggcagcccgagcggacaatcctgcggcccaggtttcggagagaggtg
gaaaagaccgcctgcccctctggcaagaaggccagagagatcgacgagagcctgatcttctacaagaagtgggagct
ggaagcctgcgtggacgccgctctgctggccacccagatggacagagtgaacgccatccccttcacctatgagcagctg
gacgtgctgaagcacaagctggatgagctgtacccccagggctaccccgagagcgtgatccagcacctgggctacctgt
ttctgaagatgagccccgaggacatccggaagtggaacgtgaccagcctggaaaccctgaaggccctgctggaagtga
acaagggccacgagatgtccccccaggtggccacactgatcgacagattcgtgaagggcagaggccagctggacaag
gacaccctggatacactgaccgccttctaccccggctatctgtgcagcctgtcccccgaggaactgagcagcgtgccacct
agctctatctgggctgtgcggccccaggacctggatacctgcgatcctagacagctggatgtgctgtatcccaaggcccgg
ctggccttccagaacatgaacggcagcgagtacttcgtgaagatccagtccttcctgggcggagcccctaccgaggacct
gaaagctctgagccagcagaacgtgtccatggatctggccacctttatgaagctgcggaccgacgccgtgctgcctctga
cagtggctgaggtgcagaaactgctgggcccccatgtggaagggctgaaggccgaagaacggcacagacccgtgcg
cgactggatcctgaggcagagacaggatgacctggacacactgggcctgggactgcaggggggcatccctaatggcta
cctggtgctggacctgagcatgcaggaagccctg
SEQ ID NO: 36-Plasmid 1272 Polypeptide
MASGAAPEPERTPVGQGSWAHPGRTRGPSDRGFCVVSPARPAEEATSLEGALSGTR
HSHPSVGRQHHAGPPSTSRPPRPWDTPCPPVYAETKHFLYSSGDKEQLRPSFLLSSL
RPSLTGARRLVETIFLGSRPWMPGTPRRLPRLPQRYWQMRPLFLELLGNHAQCPYGV
LLKTHCPLRAAVTPAAGVCAREKPQGSVAAPEEEDTDPRRLVQLLRQHSSPWQVYGF
VRACLRRLVPPGLWGSRHNERRFLRNTKKFISLGKHAKLSLQELTWKMSVRDCAWLR
RSPGVGCVPAAEHRLREElLAKFLHWLMSVYVVELLRSFFYVTETTFQKNRLFFYRKSV
WSKLQSIGIRQHLKRVQLRELSEAEVRQHREARPALLTSRLRFIPKPDGLRPIVNMDYV
VGARTFRREKRAERLTSRVKALFSVLNYERARRPGLLGASVLGLDDIHRAWRTFVLRV
RAQDPPPELYFVKVAITGAYDTIPQDRLTEVIASIIKPQNTYCVRRYAVVQKAAHGHVRK
AFKSHVSTLTDLQPYMRQFVAHLQETSPLRDAVVIEQSSSLNEASSGLFDVFLRFMCH
HAVRIRGKSYVQCQGIPQGSILSTLLCSLCYGDMENKLFAGIRRDGLLLRLVDDFLLVTP
HLTHAKTFLRTLVRGVPEYGCVVNLRKTVVNFPVEDEALGGTAFVQMPAHGLFPWCG
LLLDTRTLEVQSDYSSYARTSIRASLTFNRGFKAGRNMRRKLFGVLRLKCHSLFLDLQV
NSLQTVCTNIYKILLLQAYRFHACVLQLPFHQQVWKNPTFFLRVISDTASLCYSILKAKN
AGMSLGAKGAAGPLPSEAVQWLCHQAFLLKLTRHRVTYVPLLGSLRTAQTQLSRKLP
GTTLTALEAAANPALPSDFKTILDGSGEGRGSLLTCGDVEENPGPLAGETGQEAAPLD
GVLANPPNISSLSPRQLLGFPCAEVSGLSTERVRELAVALAQKNVKLSTEQLRCLAHRL
SEPPEDLDALPLDLLLFLNPDAFSGPQACTRFFSRITKANVDLLPRGAPERQRLLPAAL
ACWGVRGSLLSEADVRALGGLACDLPGRFVAESAEVLLPRLVSCPGPLDQDQQEAAR
AALQGGGPPYGPPSTWSVSTMDALRGLLPVLGQPIIRSIPQGIVAAWRQRSSRDPSWR
QPERTILRPRFRREVEKTACPSGKKAREIDESLIFYKKWELEACVDAALLATQMDRVNAI
PFTYEQLDVLKHKLDELYPQGYPESVIQHLGYLFLKMSPEDIRKWNVTSLETLKALLEV
NKGHEMSPQVATLIDRFVKGRGQLDKDTLDTLTAFYPGYLCSLSPEELSSVPPSSIWAV
RPQDLDTCDPRQLDVLYPKARLAFQNMNGSEYFVKIQSFLGGAPTEDLKALSQQNVS
MDLATFMKLRTDAVLPLTVAEVQKLLGPHVEGLKAEERHRPVRDWILRQRQDDLDTLG
LGLQGGIPNGYLVLDLSMQEAL
SEQ ID NO: 37-Plasmid 1273 ORF
atggctagcggagctgccccggagccggagaggacccccgttggccagggatcgtgggcccatccgggacgcacca
ggggaccatccgacaggggattctgtgtggtgtcaccggccaggccagcagaagaggcaaccagcctcgagggagc
gttgtctggaaccagacattcccacccgtcggtgggccggcagcaccacgcgggaccaccgtccacttccagaccgcca
cggccatgggacaccccttgcccgcctgtgtatgccgagactaaacacttcctgtactcatccggagacaaggaacagctt
cggccgtccttcctcctgtcgtcgctcagaccgagcctgaccggagcacgcagattggtggaaactatcttccttgggtcac
gtccgtggatgccaggtaccccacggcgcctcccgcgcctcccacagagatactggcagatgcggcctctgttcctggaa
ttgctgggaaaccacgctcagtgcccgtacggagtcctgctcaagactcactgccctctgagggcggcggtcactccggc
ggccggagtgtgcgcacgggagaagccccagggaagcgtggcagctccggaagaggaggacaccgatccgcgccg
cctcgtgcaacttctgcgccagcactcctcgccctggcaagtctacgggttcgtccgcgcctgcctgcgccgcctggtgccg
cctgggctctggggttcccggcataacgagcgccgcttcctgagaaatactaagaagtttatctcacttggaaaacatgcca
agttgtcgctgcaagaactcacgtggaagatgtcagtccgcgattgcgcctggctgcgccgctcgccgggcgtcgggtgtg
ttccagctgcagaacaccgcctgagagaagaaattctggccaaatttctgcattggctgatgtcagtgtacgtggtcgagct
gctgcgctcctttttctacgtcactgagactacctttcaaaagaaccgcctgttcttctaccgcaaatctgtgtggagcaagctg
cagtcaatcggcattcgccagcatctgaagagggtgcagctgcgggaactttccgaggcagaagtccgccagcaccgg
gaggcccggccggcgcttctcacgtcgcgtctgagattcatcccaaagcccgacgggctgaggcctatcgtcaacatgga
ttacgtcgtgggcgctcgcacctttcgccgtgaaaagcgggccgaacgcttgacctcacgggtgaaggccctcttctccgtg
ctgaactacgagagagcaagacggcctggcctgctgggagcttcggtgctgggactggacgatatccaccgggcttggc
ggacctttgttctccgggtgagagcccaagaccctccgccggaactgtacttcgtgaaggtggcgatcaccggagcctatg
atactattccgcaagatcgactcaccgaagtcatcgcctcgatcatcaaaccgcagaacacttactgcgtcaggcggtac
gccgtggtccagaaggccgcgcatggccacgtgagaaaggcgttcaagtcgcacgtgtccactctcaccgacctccagc
cttacatgaggcaattcgttgcgcatttgcaagagacttcgcccctgagagatgcggtggtcatcgagcagagctccagcct
gaacgaagcgagcagcggtctgtttgacgtgttcctccgcttcatgtgtcatcacgcggtgcgaatcaggggaaaatcata
cgtgcagtgccagggaatcccacaaggcagcattctgtcgactctcttgtgttccctttgctacggcgatatggaaaacaag
ctgttcgctgggatcagacgggacgggttgctgctcagactggtggacgacttcctgctggtgactccgcacctcactcacg
ccaaaacctttctccgcactctggtgaggggagtgccagaatacggctgtgtggtcaatctccggaaaactgtggtgaattt
ccctgtcgaggatgaggcactcggaggaaccgcatttgtccaaatgccagcacatggcctgttcccatggtgcggtctgct
gctggacacccgaactcttgaagtgcagtccgactactccagctatgcccggacgagcatccgcgccagcctcactttca
atcgcggctttaaggccggacgaaacatgcgcagaaagcttttcggagtcctccggcttaaatgccattcgctctttctcgat
ctccaagtcaattcgctgcagaccgtgtgcacgaacatctacaagatcctgctgctccaagcctaccggttccacgcttgcg
tgcttcagctgccgtttcaccaacaggtgtggaagaacccgaccttctttctgcgggtcattagcgatactgcctccctgtgtta
ctcaatcctcaaggcaaagaacgccggaatgtcgctgggtgcgaaaggagccgcgggacctcttcctagcgaagcggt
gcagtggctctgccaccaggctttcctcctgaagctgaccaggcacagagtgacctacgtcccgctgctgggctcgctgcg
cactgcacagacccagctgtctagaaaactccccggcaccaccctgaccgctctggaagccgccgccaacccagcatt
gccgtcagatttcaagaccatcttggacggaggctccggcggactggctggcgagacaggacaggaagccgctcctctg
gacggcgtgctggccaaccctcccaatatcagcagcctgagccccagacagctgctgggattcccttgtgccgaggtgtc
cggcctgagcacagagagagtgcgggaactggctgtggccctggcccagaaaaacgtgaagctgagcaccgagcag
ctgcggtgcctggcccacagactgtctgagcctcccgaggatctggacgccctgcctctggatctgctgctgttcctgaacc
ccgacgccttcagcggacctcaggcctgcacccggttcttcagcagaatcaccaaggccaacgtggacctgctgcccag
aggcgcccctgagagacagagactgctgcctgctgctctggcctgttggggagtgcggggctctctgctgtctgaagctgat
gtgcgggccctgggaggcctggcttgtgatctgcctggaagattcgtggccgagagcgccgaagtgctgctgcctagact
ggtgtcctgtcccggccctctggaccaggatcagcaggaagctgccagagctgctctgcagggcggaggccctccttatg
gacctcctagcacttggagcgtgtccaccatggatgccctgaggggcctgctgccagtgctgggccagcctatcatcagat
ccatcccacagggcatcgtggccgcctggcggcagagaagctctagagatccctcttggcggcagcccgagcggacaa
tcctgcggcccaggtttcggagagaggtggaaaagaccgcctgcccctctggcaagaaggccagagagatcgacgag
agcctgatcttctacaagaagtgggagctggaagcctgcgtggacgccgctctgctggccacccagatggacagagtga
acgccatccccttcacctatgagcagctggacgtgctgaagcacaagctggatgagctgtacccccagggctaccccga
gagcgtgatccagcacctgggctacctgtttctgaagatgagccccgaggacatccggaagtggaacgtgaccagcctg
gaaaccctgaaggccctgctggaagtgaacaagggccacgagatgtccccccaggtggccacactgatcgacagattc
gtgaagggcagaggccagctggacaaggacaccctggatacactgaccgccttctaccccggctatctgtgcagcctgt
cccccgaggaactgagcagcgtgccacctagctctatctgggctgtgcggccccaggacctggatacctgcgatcctaga
cagctggatgtgctgtatcccaaggcccggctggccttccagaacatgaacggcagcgagtacttcgtgaagatccagtc
cttcctgggcggagcccctaccgaggacctgaaagctctgagccagcagaacgtgtccatggatctggccacctttatga
agctgcggaccgacgccgtgctgcctctgacagtggctgaggtgcagaaactgctgggcccccatgtggaagggctgaa
ggccgaagaacggcacagacccgtgcgcgactggatcctgaggcagagacaggatgacctggacacactgggcctg
ggactgcaggggggcatccctaatggctacctggtgctggacctgagcatgcaggaagccctg
SEQ ID NO: 38-Plasmid 1273 Polypeptide
MASGAAPEPERTPVGQGSWAHPGRTRGPSDRGFCVVSPARPAEEATSLEGALSGTR
HSHPSVGRQHHAGPPSTSRPPRPWDTPCPPVYAETKHFLYSSGDKEQLRPSFLLSSL
RPSLTGARRLVETIFLGSRPWMPGTPRRLPRLPQRYWQMRPLFLELLGNHAQCPYGV
LLKTHCPLRAAVTPAAGVCAREKPQGSVAAPEEEDTDPRRLVQLLRQHSSPWQVYGF
VRACLRRLVPPGLWGSRHNERRFLRNTKKFISLGKHAKLSLQELTWKMSVRDCAWLR
RSPGVGCVPAAEHRLREElLAKFLHWLMSVYVVELLRSFFYVTETTFQKNRLFFYRKSV
WSKLQSIGIRQHLKRVQLRELSEAEVRQHREARPALLTSRLRFIPKPDGLRPIVNMDYV
VGARTFRREKRAERLTSRVKALFSVLNYERARRPGLLGASVLGLDDIHRAWRTFVLRV
RAQDPPPELYFVKVAITGAYDTIPQDRLTEVIASIIKPQNTYCVRRYAVVQKAAHGHVRK
AFKSHVSTLTDLQPYMRQFVAHLQETSPLRDAVVIEQSSSLNEASSGLFDVFLRFMCH
HAVRIRGKSYVQCQGIPQGSILSTLLCSLCYGDMENKLFAGIRRDGLLLRLVDDFLLVTP
HLTHAKTFLRTLVRGVPEYGCVVNLRKTVVNFPVEDEALGGTAFVQMPAHGLFPWCG
LLLDTRTLEVQSDYSSYARTSIRASLTFNRGFKAGRNMRRKLFGVLRLKCHSLFLDLQV
NSLQTVCTNIYKILLLQAYRFHACVLQLPFHQQVWKNPTFFLRVISDTASLCYSILKAKN
AGMSLGAKGAAGPLPSEAVQWLCHQAFLLKLTRHRVTYVPLLGSLRTAQTQLSRKLP
GTTLTALEAAANPALPSDFKTILDGGSGGLAGETGQEAAPLDGVLANPPNISSLSPRQL
LGFPCAEVSGLSTERVRELAVALAQKNVKLSTEQLRCLAHRLSEPPEDLDALPLDLLLF
LNPDAFSGPQACTRFFSRITKANVDLLPRGAPERQRLLPAALACWGVRGSLLSEADVR
ALGGLACDLPGRFVAESAEVLLPRLVSCPGPLDQDQQEAARAALQGGGPPYGPPSTW
SVSTMDALRGLLPVLGQPIIRSIPQGIVAAWRQRSSRDPSWRQPERTILRPRFRREVEK
TACPSGKKAREIDESLIFYKKWELEACVDAALLATQMDRVNAIPFTYEQLDVLKHKLDEL
YPQGYPESVIQHLGYLFLKMSPEDIRKWNVTSLETLKALLEVNKGHEMSPQVATLIDRF
VKGRGQLDKDTLDTLTAFYPGYLCSLSPEELSSVPPSSIWAVRPQDLDTCDPRQLDVL
YPKARLAFQNMNGSEYFVKIQSFLGGAPTEDLKALSQQNVSMDLATFMKLRTDAVLPL
TVAEVQKLLGPHVEGLKAEERHRPVRDWILRQRQDDLDTLGLGLQGGIPNGYLVLDLS
MQEAL
SEQ ID NO: 39-Plasmid 1274 ORF
atggctagcctggctggcgagacaggacaggaagccgctcctctggacggcgtgctggccaaccctcccaatatcagc
agcctgagccccagacagctgctgggattcccttgtgccgaggtgtccggcctgagcacagagagagtgcgggaactgg
ctgtggccctggcccagaaaaacgtgaagctgagcaccgagcagctgcggtgcctggcccacagactgtctgagcctcc
cgaggatctggacgccctgcctctggatctgctgctgttcctgaaccccgacgccttcagcggacctcaggcctgcacccg
gttcttcagcagaatcaccaaggccaacgtggacctgctgcccagaggcgcccctgagagacagagactgctgcctgct
gctctggcctgttggggagtgcggggctctctgctgtctgaagctgatgtgcgggccctgggaggcctggcttgtgatctgcc
tggaagattcgtggccgagagcgccgaagtgctgctgcctagactggtgtcctgtcccggccctctggaccaggatcagc
aggaagctgccagagctgctctgcagggcggaggccctccttatggacctcctagcacttggagcgtgtccaccatggat
gccctgaggggcctgctgccagtgctgggccagcctatcatcagatccatcccacagggcatcgtggccgcctggcggc
agagaagctctagagatccctcttggcggcagcccgagcggacaatcctgcggcccaggtttcggagagaggtggaaa
agaccgcctgcccctctggcaagaaggccagagagatcgacgagagcctgatcttctacaagaagtgggagctggaa
gcctgcgtggacgccgctctgctggccacccagatggacagagtgaacgccatccccttcacctatgagcagctggacgt
gctgaagcacaagctggatgagctgtacccccagggctaccccgagagcgtgatccagcacctgggctacctgtttctga
agatgagccccgaggacatccggaagtggaacgtgaccagcctggaaaccctgaaggccctgctggaagtgaacaa
gggccacgagatgtccccccaggtggccacactgatcgacagattcgtgaagggcagaggccagctggacaaggaca
ccctggatacactgaccgccttctaccccggctatctgtgcagcctgtcccccgaggaactgagcagcgtgccacctagct
ctatctgggctgtgcggccccaggacctggatacctgcgatcctagacagctggatgtgctgtatcccaaggcccggctgg
ccttccagaacatgaacggcagcgagtacttcgtgaagatccagtccttcctgggcggagcccctaccgaggacctgaa
agctctgagccagcagaacgtgtccatggatctggccacctttatgaagctgcggaccgacgccgtgctgcctctgacagt
ggctgaggtgcagaaactgctgggcccccatgtggaagggctgaaggccgaagaacggcacagacccgtgcgcgac
tggatcctgaggcagagacaggatgacctggacacactgggcctgggactgcaggggggcatccctaatggctacctg
gtgctggacctgagcatgcaggaagccctgggatccggcgagggcagaggcagcctgctgacatgtggcgacgtgga
agagaaccctggccccggagctgccccggagccggagaggacccccgttggccagggatcgtgggcccatccggga
cgcaccaggggaccatccgacaggggattctgtgtggtgtcaccggccaggccagcagaagaggcaaccagcctcga
gggagcgttgtctggaaccagacattcccacccgtcggtgggccggcagcaccacgcgggaccaccgtccacttccag
accgccacggccatgggacaccccttgcccgcctgtgtatgccgagactaaacacttcctgtactcatccggagacaagg
aacagcttcggccgtccttcctcctgtcgtcgctcagaccgagcctgaccggagcacgcagattggtggaaactatcttcctt
gggtcacgtccgtggatgccaggtaccccacggcgcctcccgcgcctcccacagagatactggcagatgcggcctctgtt
cctggaattgctgggaaaccacgctcagtgcccgtacggagtcctgctcaagactcactgccctctgagggcggcggtca
ctccggcggccggagtgtgcgcacgggagaagccccagggaagcgtggcagctccggaagaggaggacaccgatc
cgcgccgcctcgtgcaacttctgcgccagcactcctcgccctggcaagtctacgggttcgtccgcgcctgcctgcgccgcct
ggtgccgcctgggctctggggttcccggcataacgagcgccgcttcctgagaaatactaagaagtttatctcacttggaaa
acatgccaagttgtcgctgcaagaactcacgtggaagatgtcagtccgcgattgcgcctggctgcgccgctcgccgggcg
tcgggtgtgttccagctgcagaacaccgcctgagagaagaaattctggccaaatttctgcattggctgatgtcagtgtacgtg
gtcgagctgctgcgctcctttttctacgtcactgagactacctttcaaaagaaccgcctgttcttctaccgcaaatctgtgtgga
gcaagctgcagtcaatcggcattcgccagcatctgaagagggtgcagctgcgggaactttccgaggcagaagtccgcca
gcaccgggaggcccggccggcgcttctcacgtcgcgtctgagattcatcccaaagcccgacgggctgaggcctatcgtc
aacatggattacgtcgtgggcgctcgcacctttcgccgtgaaaagcgggccgaacgcttgacctcacgggtgaaggccct
cttctccgtgctgaactacgagagagcaagacggcctggcctgctgggagcttcggtgctgggactggacgatatccacc
gggcttggcggacctttgttctccgggtgagagcccaagaccctccgccggaactgtacttcgtgaaggtggcgatcaccg
gagcctatgatactattccgcaagatcgactcaccgaagtcatcgcctcgatcatcaaaccgcagaacacttactgcgtca
ggcggtacgccgtggtccagaaggccgcgcatggccacgtgagaaaggcgttcaagtcgcacgtgtccactctcaccg
acctccagccttacatgaggcaattcgttgcgcatttgcaagagacttcgcccctgagagatgcggtggtcatcgagcaga
gctccagcctgaacgaagcgagcagcggtctgtttgacgtgttcctccgcttcatgtgtcatcacgcggtgcgaatcagggg
aaaatcatacgtgcagtgccagggaatcccacaaggcagcattctgtcgactctcttgtgttccctttgctacggcgatatgg
aaaacaagctgttcgctgggatcagacgggacgggttgctgctcagactggtggacgacttcctgctggtgactccgcacc
tcactcacgccaaaacctttctccgcactctggtgaggggagtgccagaatacggctgtgtggtcaatctccggaaaactgt
ggtgaatttccctgtcgaggatgaggcactcggaggaaccgcatttgtccaaatgccagcacatggcctgttcccatggtgc
ggtctgctgctggacacccgaactcttgaagtgcagtccgactactccagctatgcccggacgagcatccgcgccagcct
cactttcaatcgcggctttaaggccggacgaaacatgcgcagaaagctttttcggagtcctccggcttaaatgccattcgctct
ttctcgatctccaagtcaattcgctgcagaccgtgtgcacgaacatctacaagatcctgctgctccaagcctaccggttccac
gcttgcgtgcttcagctgccgtttcaccaacaggtgtggaagaacccgaccttctttctgcgggtcattagcgatactgcctcc
ctgtgttactcaatcctcaaggcaaagaacgccggaatgtcgctgggtgcgaaaggagccgcgggacctcttcctagcga
agcggtgcagtggctctgccaccaggctttcctcctgaagctgaccaggcacagagtgacctacgtcccgctgctgggctc
gctgcgcactgcacagacccagctgtctagaaaactccccggcaccaccctgaccgctctggaagccgccgccaaccc
agcattgccgtcagatttcaagaccatcttggac
SEQ ID NO: 40-Plasmid 1274 Polypeptide
MASLAGETGQEAAPLDGVLANPPNISSLSPRQLLGFPCAEVSGLSTERVRELAVALAQ
KNVKLSTEQLRCLAHRLSEPPEDLDALPLDLLLFLNPDAFSGPQACTRFFSRITKANVDL
LPRGAPERQRLLPAALACWGVRGSLLSEADVRALGGLACDLPGRFVAESAEVLLPRLV
SCPGPLDQDQQEAARAALQGGGPPYGPPSTWSVSTMDALRGLLPVLGQPIIRSIPQGI
VAAWRQRSSRDPSWRQPERTILRPRFRREVEKTACPSGKKAREIDESLIFYKKWELEA
CVDAALLATQMDRVNAIPFTYEQLDVLKHKLDELYPQGYPESVIQHLGYLFLKMSPEDI
RKWNVTSLETLKALLEVNKGHEMSPQVATLIDRFVKGRGQLDKDTLDTLTAFYPGYLC
SLSPEELSSVPPSSIWAVRPQDLDTCDPRQLDVLYPKARLAFQNMNGSEYFVKIQSFL
GGAPTEDLKALSQQNVSMDLATFMKLRTDAVLPLTVAEVQKLLGPHVEGLKAEERHRP
VRDWILRQRQDDLDTLGLGLQGGIPNGYLVLDLSMQEALGSGEGRGSLLTCGDVEEN
PGPGAAPEPERTPVGQGSWAHPGRTRGPSDRGFCVVSPARPAEEATSLEGALSGTR
HSHPSVGRQHHAGPPSTSRPPRPWDTPCPPVYAETKHFLYSSGDKEQLRPSFLLSSL
RPSLTGARRLVETIFLGSRPWMPGTPRRLPRLPQRYWQMRPLFLELLGNHAQCPYGV
LLKTHCPLRAAVTPAAGVCAREKPQGSVAAPEEEDTDPRRLVQLLRQHSSPWQVYGF
VRACLRRLVPPGLWGSRHNERRFLRNTKKFISLGKHAKLSLQELTWKMSVRDCAWLR
RSPGVGCVPAAEHRLREEILAKFLHWLMSVYVVELLRSFFYVTETTFQKNRLFFYRKSV
WSKLQSIGIRQHLKRVQLRELSEAEVRQHREARPALLTSRLRFIPKPDGLRPIVNMDYV
VGARTFRREKRAERLTSRVKALFSVLNYERARRPGLLGASVLGLDDIHRAWRTFVLRV
RAQDPPPELYFVKVAITGAYDTIPQDRLTEVIASIIKPQNTYCVRRYAVVQKAAHGHVRK
AFKSHVSTLTDLQPYMRQFVAHLQETSPLRDAVVIEQSSSLNEASSGLFDVFLRFMCH
HAVRIRGKSYVQCQGIPQGSILSTLLCSLCYGDMENKLFAGIRRDGLLLRLVDDFLLVTP
HLTHAKTFLRTLVRGVPEYGCVVNLRKTVVNFPVEDEALGGTAFVQMPAHGLFPWCG
LLLDTRTLEVQSDYSSYARTSIRASLTFNRGFKAGRNMRRKLFGVLRLKCHSLFLDLQV
NSLQTVCTNIYKILLLQAYRFHACVLQLPFHQQVWKNPTFFLRVISDTASLCYSILKAKN
AGMSLGAKGAAGPLPSEAVQWLCHQAFLLKLTRHRVTYVPLLGSLRTAQTQLSRKLP
GTTLTALEAAANPALPSDFKTILD
SEQ ID NO: 41-Plasmid 1275 ORF
atggctagcctggctggcgagacaggacaggaagccgctcctctggacggcgtgctggccaaccctcccaatatcagc
agcctgagccccagacagctgctgggattcccttgtgccgaggtgtccggcctgagcacagagagagtgcgggaactgg
ctgtggccctggcccagaaaaacgtgaagctgagcaccgagcagctgcggtgcctggcccacagactgtctgagcctcc
cgaggatctggacgccctgcctctggatctgctgctgttcctgaaccccgacgccttcagcggacctcaggcctgcacccg
gttcttcagcagaatcaccaaggccaacgtggacctgctgcccagaggcgcccctgagagacagagactgctgcctgct
gctctggcctgttggggagtgcggggctctctgctgtctgaagctgatgtgcgggccctgggaggcctggcttgtgatctgcc
tggaagattcgtggccgagagcgccgaagtgctgctgcctagactggtgtcctgtcccggccctctggaccaggatcagc
aggaagctgccagagctgctctgcagggcggaggccctccttatggacctcctagcacttggagcgtgtccaccatggat
gccctgaggggcctgctgccagtgctgggccagcctatcatcagatccatcccacagggcatcgtggccgcctggcggc
agagaagctctagagatccctcttggcggcagcccgagcggacaatcctgcggcccaggtttcggagagaggtggaaa
agaccgcctgcccctctggcaagaaggccagagagatcgacgagagcctgatcttctacaagaagtgggagctggaa
gcctgcgtggacgccgctctgctggccacccagatggacagagtgaacgccatccccttcacctatgagcagctggacgt
gctgaagcacaagctggatgagctgtacccccagggctaccccgagagcgtgatccagcacctgggctacctgtttctga
agatgagccccgaggacatccggaagtggaacgtgaccagcctggaaaccctgaaggccctgctggaagtgaacaa
gggccacgagatgtccccccaggtggccacactgatcgacagattcgtgaagggcagaggccagctggacaaggaca
ccctggatacactgaccgccttctaccccggctatctgtgcagcctgtcccccgaggaactgagcagcgtgccacctagct
ctatctgggctgtgcggccccaggacctggatacctgcgatcctagacagctggatgtgctgtatcccaaggcccggctgg
ccttccagaacatgaacggcagcgagtacttcgtgaagatccagtccttcctgggcggagcccctaccgaggacctgaa
agctctgagccagcagaacgtgtccatggatctggccacctttatgaagctgcggaccgacgccgtgctgcctctgacagt
ggctgaggtgcagaaactgctgggcccccatgtggaagggctgaaggccgaagaacggcacagacccgtgcgcgac
tggatcctgaggcagagacaggatgacctggacacactgggcctgggactgcaggggggcatccctaatggctacctg
gtgctggacctgagcatgcaggaagccctgggaggctccggcggaggagctgccccggagccggagaggacccccg
ttggccagggatcgtgggcccatccgggacgcaccaggggaccatccgacaggggattctgtgtggtgtcaccggccag
gccagcagaagaggcaaccagcctcgagggagcgttgtctggaaccagacattcccacccgtcggtgggccggcagc
accacgcgggaccaccgtccacttccagaccgccacggccatgggacaccccttgcccgcctgtgtatgccgagactaa
acacttcctgtactcatccggagacaaggaacagcttcggccgtccttcctcctgtcgtcgctcagaccgagcctgaccgg
agcacgcagattggtggaaactatcttccttgggtcacgtccgtggatgccaggtaccccacggcgcctcccgcgcctccc
acagagatactggcagatgcggcctctgttcctggaattgctgggaaaccacgctcagtgcccgtacggagtcctgctcaa
gactcactgccctctgagggcggcggtcactccggcggccggagtgtgcgcacgggagaagccccagggaagcgtgg
cagctccggaagaggaggacaccgatccgcgccgcctcgtgcaacttctgcgccagcactcctcgccctggcaagtcta
cgggttcgtccgcgcctgcctgcgccgcctggtgccgcctgggctctggggttcccggcataacgagcgccgcttcctgag
aaatactaagaagtttatctcacttggaaaacatgccaagttgtcgctgcaagaactcacgtggaagatgtcagtccgcgat
tgcgcctggctgcgccgctcgccgggcgtcgggtgtgttccagctgcagaacaccgcctgagagaagaaattctggcca
aatttctgcattggctgatgtcagtgtacgtggtcgagctgctgcgctcctttttctacgtcactgagactacctttcaaaagaac
cgcctgttcttctaccgcaaatctgtgtggagcaagctgcagtcaatcggcattcgccagcatctgaagagggtgcagctgc
gggaactttccgaggcagaagtccgccagcaccgggaggcccggccggcgcttctcacgtcgcgtctgagattcatccc
aaagcccgacgggctgaggcctatcgtcaacatggattacgtcgtgggcgctcgcacctttcgccgtgaaaagcgggcc
gaacgcttgacctcacgggtgaaggccctcttctccgtgctgaactacgagagagcaagacggcctggcctgctgggag
cttcggtgctgggactggacgatatccaccgggcttggcggacctttgttctccgggtgagagcccaagaccctccgccgg
aactgtacttcgtgaaggtggcgatcaccggagcctatgatactattccgcaagatcgactcaccgaagtcatcgcctcgat
catcaaaccgcagaacacttactgcgtcaggcggtacgccgtggtccagaaggccgcgcatggccacgtgagaaagg
cgttcaagtcgcacgtgtccactctcaccgacctccagccttacatgaggcaattcgttgcgcatttgcaagagacttcgccc
ctgagagatgcggtggtcatcgagcagagctccagcctgaacgaagcgagcagcggtctgtttgacgtgttcctccgcttc
atgtgtcatcacgcggtgcgaatcaggggaaaatcatacgtgcagtgccagggaatcccacaaggcagcattctgtcga
ctctcttgtgttccctttgctacggcgatatggaaaacaagctgttcgctgggatcagacgggacgggttgctgctcagactg
gtggacgacttcctgctggtgactccgcacctcactcacgccaaaacctttctccgcactctggtgaggggagtgccagaat
acggctgtgtggtcaatctccggaaaactgtggtgaatttccctgtcgaggatgaggcactcggaggaaccgcatttgtcca
aatgccagcacatggcctgttcccatggtgcggtctgctgctggacacccgaactcttgaagtgcagtccgactactccagc
tatgcccggacgagcatccgcgccagcctcactttcaatcgcggctttaaggccggacgaaacatgcgcagaaagctttt
cggagtcctccggcttaaatgccattcgctctttctcgatctccaagtcaattcgctgcagaccgtgtgcacgaacatctacaa
gatcctgctgctccaagcctaccggttccacgcttgcgtgcttcagctgccgtttcaccaacaggtgtggaagaacccgacc
ttctttctgcgggtcattagcgatactgcctccctgtgttactcaatcctcaaggcaaagaacgccggaatgtcgctgggtgcg
aaaggagccgcgggacctcttcctagcgaagcggtgcagtggctctgccaccaggctttcctcctgaagctgaccaggc
acagagtgacctacgtcccgctgctgggctcgctgcgcactgcacagacccagctgtctagaaaactccccggcaccac
cctgaccgctctggaagccgccgccaacccagcattgccgtcagatttcaagaccatcttggac
SEQ ID NO: 42-Plasmid 1275 Polypeptide
MASLAGETGQEAAPLDGVLANPPNISSLSPRQLLGFPCAEVSGLSTERVRELAVALAQ
KNVKLSTEQLRCLAHRLSEPPEDLDALPLDLLLFLNPDAFSGPQACTRFFSRITKANVDL
LPRGAPERQRLLPAALACWGVRGSLLSEADVRALGGLACDLPGRFVAESAEVLLPRLV
SCPGPLDQDQQEAARAALQGGGPPYGPPSTWSVSTMDALRGLLPVLGQPIIRSIPQGI
VAAWRQRSSRDPSWRQPERTILRPRFRREVEKTACPSGKKAREIDESLIFYKKWELEA
CVDAALLATQMDRVNAIPFTYEQLDVLKHKLDELYPQGYPESVIQHLGYLFLKMSPEDI
RKWNVTSLETLKALLEVNKGHEMSPQVATLIDRFVKGRGQLDKDTLDTLTAFYPGYLC
SLSPEELSSVPPSSIWAVRPQDLDTCDPRQLDVLYPKARLAFQNMNGSEYFVKIQSFL
GGAPTEDLKALSQQNVSMDLATFMKLRTDAVLPLTVAEVQKLLGPHVEGLKAEERHRP
VRDWILRQRQDDLDTLGLGLQGGIPNGYLVLDLSMQEALGGSGGGAAPEPERTPVGQ
GSWAHPGRTRGPSDRGFCWSPARPAEEATSLEGALSGTRHSHPSVGRQHHAGPPS
TSRPPRPWDTPCPPVYAETKHFLYSSGDKEQLRPSFLLSSLRPSLTGARRLVETIFLGS
RPWMPGTPRRLPRLPQRYWQMRPLFLELLGNHAQCPYGVLLKTHCPLRAAVTPAAGV
CAREKPQGSVAAPEEEDTDPRRLVQLLRQHSSPWQVYGFVRACLRRLVPPGLWGSR
HNERRFLRNTKKFISLGKHAKLSLQELTWKMSVRDCAWLRRSPGVGCVPAAEHRLRE
EILAKFLHWLMSVYVVELLRSFFYVTETTFQKNRLFFYRKSVVVSKLQSIGIRQHLKRVQL
RELSEAEVRQHREARPALLTSRLRFIPKPDGLRPIVNMDYVVGARTFRREKRAERLTSR
VKALFSVLNYERARRPGLLGASVLGLDDIHRAWRTFVLRVRAQDPPPELYFVKVAITGA
YDTIPQDRLTEVIASIIKPQNTYCVRRYAVVQKAAHGHVRKAFKSHVSTLTDLQPYMRQ
FVAHLQETSPLRDAVVIEQSSSLNEASSGLFDVFLRFMCHHAVRIRGKSYVQCQGIPQ
GSILSTLLCSLCYGDMENKLFAGIRRDGLLLRLVDDFLLVTPHLTHAKTFLRTLVRGVPE
YGCVVNLRKTVVNFPVEDEALGGTAFVQMPAHGLFPWCGLLLDTRTLEVQSDYSSYA
RTSIRASLTFNRGFKAGRNMRRKLFGVLRLKCHSLFLDLQVNSLQTVCTNIYKILLLQAY
RFHACVLQLPFHQQVWKNPTFFLRVISDTASLCYSILKAKNAGMSLGAKGAAGPLPSE
AVQWLCHQAFLLKLTRHRVTYVPLLGSLRTAQTQLSRKLPGTTLTALEAAANPALPSDF
KTILD
SEQ ID NO 43-Plasmid 1317 ORF
atggctagcacccctggaacccagagccccttcttccttctgctgctgctgaccgtgctgactgtcgtgacaggctctggcca
cgccagctctacacctggcggcgagaaagagacaagcgccacccagagaagcagcgtgccaagcagcaccgaga
agaacgccgtgtccatgaccagctccgtgctgagcagccactctcctggcagcggcagcagcacaacacagggccag
gatgtgacactggcccctgccacagaacctgcctctggatctgccgccacctggggacaggacgtgacaagcgtgccag
tgaccagacctgccctgggctctacaacaccccctgcccacgatgtgaccagcgcccctgataacaagcctgcccctgg
aagcacagcccctccagctcatggcgtgacctctgccccagataccagaccagccccaggatctacagccccacccgc
acacggcgtgacaagtgcccctgacacaagacccgctccaggctctactgctcctcctgcccatggcgtgacaagcgctc
ccgatacaaggccagctcctggctccacagcaccaccagcacatggcgtgacatcagctcccgacactagacctgctcc
cggatcaaccgctccaccagctcacggcgtgaccagcgcacctgataccagacctgctctgggaagcaccgcccctcc
cgtgcacaatgtgacatctgcttccggcagcgccagcggctctgcctctacactggtgcacaacggcaccagcgccaga
gccacaacaaccccagccagcaagagcacccccttcagcatccctagccaccacagcgacacccctaccacactggc
cagccactccaccaagaccgatgcctctagcacccaccactccagcgtgccccctctgaccagcagcaaccacagcac
aagcccccagctgtctaccggcgtctcattcttctttctgtccttccacatcagcaacctgcagttcaacagcagcctggaag
atcccagcaccgactactaccaggaactgcagcgggatatcagcgagatgttcctgcaaatctacaagcagggcggctt
cctgggcctgagcaacatcaagttcagacccggcagcgtggtggtgcagctgaccctggctttccgggaaggcaccatc
aacgtgcacgacgtggaaacccagttcaaccagtacaagaccgaggccgccagccggtacaacctgaccatctccgat
gtgtccgtgtccgacgtgcccttcccattctctgcccagtctggcgcaggcgtgccaggatggggaattgctctgctggtgctc
gtgtgcgtgctggtggccctggccatcgtgtatctgattgccctggccgtgtgccagtgccggcggaagaattacggccagc
tggacatcttccccgccagagacacctaccaccccatgagcgagtaccccacataccacacccacggcagatacgtgc
cacccagctccaccgacagatccccctacgagaaagtgtctgccggcaacggcggcagctccctgagctacacaaatc
ctgccgtggccgctgcctccgccaacctgggatccggcagaatcttcaacgcccactacgccggctacttcgccgacctg
ctgatccacgacatcgagacaaaccctggccccctggctggcgagacaggacaggaagccgctcctctggacggcgtg
ctggccaaccctcccaatatcagcagcctgagccccagacagctgctgggattcccttgtgccgaggtgtccggcctgag
cacagagagagtgcgggaactggctgtggccctggcccagaaaaacgtgaagctgagcaccgagcagctgcggtgc
ctggcccacagactgtctgagcctcccgaggatctggacgccctgcctctggatctgctgctgttcctgaaccccgacgcctt
cagcggacctcaggcctgcacccggttcttcagcagaatcaccaaggccaacgtggacctgctgcccagaggcgcccc
tgagagacagagactgctgcctgctgctctggcctgttggggagtgcggggctctctgctgtctgaagctgatgtgcgggcc
ctgggaggcctggcttgtgatctgcctggaagattcgtggccgagagcgccgaagtgctgctgcctagactggtgtcctgtc
ccggccctctggaccaggatcagcaggaagctgccagagctgctctgcagggcggaggccctccttatggacctcctag
cacttggagcgtgtccaccatggatgccctgaggggcctgctgccagtgctgggccagcctatcatcagatccatcccaca
gggcatcgtggccgcctggcggcagagaagctctagagatccctcttggcggcagcccgagcggacaatcctgcggcc
caggtttcggagagaggtggaaaagaccgcctgcccctctggcaagaaggccagagagatcgacgagagcctgatctt
ctacaagaagtgggagctggaagcctgcgtggacgccgctctgctggccacccagatggacagagtgaacgccatccc
cttcacctatgagcagctggacgtgctgaagcacaagctggatgagctgtacccccagggctaccccgagagcgtgatc
cagcacctgggctacctgtttctgaagatgagccccgaggacatccggaagtggaacgtgaccagcctggaaaccctga
aggccctgctggaagtgaacaagggccacgagatgtccccccaggtggccacactgatcgacagattcgtgaagggca
gaggccagctggacaaggacaccctggatacactgaccgccttctaccccggctatctgtgcagcctgtcccccgagga
actgagcagcgtgccacctagctctatctgggctgtgcggccccaggacctggatacctgcgatcctagacagctggatgt
gctgtatcccaaggcccggctggccttccagaacatgaacggcagcgagtacttcgtgaagatccagtccttcctgggcg
gagcccctaccgaggacctgaaagctctgagccagcagaacgtgtccatggatctggccacctttatgaagctgcggac
cgacgccgtgctgcctctgacagtggctgaggtgcagaaactgctgggcccccatgtggaagggctgaaggccgaaga
acggcacagacccgtgcgcgactggatcctgaggcagagacaggatgacctggacacactgggcctgggactgcagg
ggggcatccctaatggctacctggtgctggacctgagcatgcaggaagccctgggatccggcgagggcagaggcagcc
tgctgacatgtggcgacgtggaagagaaccctggccccggagctgccccggagccggagaggacccccgttggccag
ggatcgtgggcccatccgggacgcaccaggggaccatccgacaggggattctgtgtggtgtcaccggccaggccagca
gaagaggcaaccagcctcgagggagcgttgtctggaaccagacattcccacccgtcggtgggccggcagcaccacgc
gggaccaccgtccacttccagaccgccacggccatgggacaccccttgcccgcctgtgtatgccgagactaaacacttcc
tgtactcatccggagacaaggaacagcttcggccgtccttcctcctgtcgtcgctcagaccgagcctgaccggagcacgc
agattggtggaaactatcttccttgggtcacgtccgtggatgccaggtaccccacggcgcctcccgcgcctcccacagaga
tactggcagatgcggcctctgttcctggaattgctgggaaaccacgctcagtgcccgtacggagtcctgctcaagactcact
gccctctgagggcggcggtcactccggcggccggagtgtgcgcacgggagaagccccagggaagcgtggcagctcc
ggaagaggaggacaccgatccgcgccgcctcgtgcaacttctgcgccagcactcctcgccctggcaagtctacgggttc
gtccgcgcctgcctgcgccgcctggtgccgcctgggctctggggttcccggcataacgagcgccgcttcctgagaaatact
aagaagtttatctcacttggaaaacatgccaagttgtcgctgcaagaactcacgtggaagatgtcagtccgcgattgcgcct
ggctgcgccgctcgccgggcgtcgggtgtgttccagctgcagaacaccgcctgagagaagaaattctggccaaatttctg
cattggctgatgtcagtgtacgtggtcgagctgctgcgctcctttttctacgtcactgagactacctttcaaaagaaccgcctgtt
cttctaccgcaaatctgtgtggagcaagctgcagtcaatcggcattcgccagcatctgaagagggtgcagctgcgggaac
tttccgaggcagaagtccgccagcaccgggaggcccggccggcgcttctcacgtcgcgtctgagattcatcccaaagcc
cgacgggctgaggcctatcgtcaacatggattacgtcgtgggcgctcgcacctttcgccgtgaaaagcgggccgaacgct
tgacctcacgggtgaaggccctcttctccgtgctgaactacgagagagcaagacggcctggcctgctgggagcttcggtg
ctgggactggacgatatccaccgggcttggcggacctttgttctccgggtgagagcccaagaccctccgccggaactgta
cttcgtgaaggtggcgatcaccggagcctatgatactattccgcaagatcgactcaccgaagtcatcgcctcgatcatcaa
accgcagaacacttactgcgtcaggcggtacgccgtggtccagaaggccgcgcatggccacgtgagaaaggcgttcaa
gtcgcacgtgtccactctcaccgacctccagccttacatgaggcaattcgttgcgcatttgcaagagacttcgcccctgaga
gatgcggtggtcatcgagcagagctccagcctgaacgaagcgagcagcggtctgtttgacgtgttcctccgcttcatgtgtc
atcacgcggtgcgaatcaggggaaaatcatacgtgcagtgccagggaatcccacaaggcagcattctgtcgactctcttg
tgttccctttgctacggcgatatggaaaacaagctgttcgctgggatcagacgggacgggttgctgctcagactggtggacg
acttcctgctggtgactccgcacctcactcacgccaaaacctttctccgcactctggtgaggggagtgccagaatacggctg
tgtggtcaatctccggaaaactgtggtgaatttccctgtcgaggatgaggcactcggaggaaccgcatttgtccaaatgcca
gcacatggcctgttcccatggtgcggtctgctgctggacacccgaactcttgaagtgcagtccgactactccagctatgccc
ggacgagcatccgcgccagcctcactttcaatcgcggctttaaggccggacgaaacatgcgcagaaagcttttcggagtc
ctccggcttaaatgccattcgctctttctcgatctccaagtcaattcgctgcagaccgtgtgcacgaacatctacaagatcctg
ctgctccaagcctaccggttccacgcttgcgtgcttcagctgccgtttcaccaacaggtgtggaagaacccgaccttctttctg
cgggtcattagcgatactgcctccctgtgttactcaatcctcaaggcaaagaacgccggaatgtcgctgggtgcgaaagg
agccgcgggacctcttcctagcgaagcggtgcagtggctctgccaccaggctttcctcctgaagctgaccaggcacagag
tgacctacgtcccgctgctgggctcgctgcgcactgcacagacccagctgtctagaaaactccccggcaccaccctgacc
gctctggaagccgccgccaacccagcattgccgtcagatttcaagaccatcttggac
SEQ ID NO: 44-Plasmid 1317 Polypeptide
MASTPGTQSPFFLLLLLTVLTVVTGSGHASSTPGGEKETSATQRSSVPSSTEKNAVSM
TSSVLSSHSPGSGSSTTQGQDVTLAPATEPASGSAATWGQDVTSVPVTRPALGSTTP
PAHDVTSAPDNKPAPGSTAPPAHGVTSAPDTRPAPGSTAPPAHGVTSAPDTRPAPGS
TAPPAHGVTSAPDTRPAPGSTAPPAHGVTSAPDTRPAPGSTAPPAHGVTSAPDTRPAL
GSTAPPVHNVTSASGSASGSASTLVHNGTSARATTTPASKSTPFSIPSHHSDTPTTLAS
HSTKTDASSTHHSSVPPLTSSNHSTSPQLSTGVSFFFLSFHISNLQFNSSLEDPSTDYY
QELQRDISEMFLQIYKQGGFLGLSNIKFRPGSVVVQLTLAFREGTINVHDVETQFNQYK
TEAASRYNLTISDVSVSDVPFPFSAQSGAGVPGWGIALLVLVCVLVALAIVYLIALAVCQ
CRRKNYGQLDIFPARDTYHPMSEYPTYHTHGRYVPPSSTDRSPYEKVSAGNGGSSLS
YTNPAVAAASANLGSGRIFNAHYAGYFADLLIHDIETNPGPLAGETGQEAAPLDGVLAN
PPNISSLSPRQLLGFPCAEVSGLSTERVRELAVALAQKNVKLSTEQLRCLAHRLSEPPE
DLDALPLDLLLFLNPDAFSGPQACTRFFSRITKANVDLLPRGAPERQRLLPAALACWGV
RGSLLSEADVRALGGLACDLPGRFVAESAEVLLPRLVSCPGPLDQDQQEAARAALQG
GGPPYGPPSTWSVSTMDALRGLLPVLGQPIIRSIPQGIVAAWRQRSSRDPSWRQPERT
ILRPRFRREVEKTACPSGKKAREIDESLIFYKKWELEACVDAALLATQMDRVNAIPFTYE
QLDVLKHKLDELYPQGYPESVIQHLGYLFLKMSPEDIRKWNVTSLETLKALLEVNKGHE
MSPQVATLIDRFVKGRGQLDKDTLDTLTAFYPGYLCSLSPEELSSVPPSSIWAVRPQDL
DTCDPRQLDVLYPKARLAFQNMNGSEYFVKIQSFLGGAPTEDLKALSQQNVSMDLATF
MKLRTDAVLPLTVAEVQKLLGPHVEGLKAEERHRPVRDWILRQRQDDLDTLGLGLQG
GIPNGYLVLDLSMQEALGSGEGRGSLLTCGDVEENPGPGAAPEPERTPVGQGSWAH
PGRTRGPSDRGFCWSPARPAEEATSLEGALSGTRHSHPSVGRQHHAGPPSTSRPP
RPWDTPCPPVYAETKHFLYSSGDKEQLRPSFLLSSLRPSLTGARRLVETIFLGSRPWM
PGTPRRLPRLPQRYWQMRPLFLELLGNHAQCPYGVLLKTHCPLRAAVTPAAGVCARE
KPQGSVAAPEEEDTDPRRLVQLLRQHSSPWQVYGFVRACLRRLVPPGLWGSRHNER
RFLRNTKKFISLGKHAKLSLQELTWKMSVRDCAWLRRSPGVGCVPAAEHRLREEILAK
FLHWLMSVYVVELLRSFFYVTETTFQKNRLFFYRKSVWSKLQSIGIRQHLKRVQLRELS
EAEVRQHREARPALLTSRLRFIPKPDGLRPIVNMDYVVGARTFRREKRAERLTSRVKAL
FSVLNYERARRPGLLGASVLGLDDIHRAWRTFVLRVRAQDPPPELYFVKVAITGAYDTI
PQDRLTEVIASIIKPQNTYCVRRYAVVQKAAHGHVRKAFKSHVSTLTDLQPYMRQFVAH
LQETSPLRDAVVIEQSSSLNEASSGLFDVFLRFMCHHAVRIRGKSYVQCQGIPQGSILS
TLLCSLCYGDMENKLFAGIRRDGLLLRLVDDFLLVTPHLTHAKTFLRTLVRGVPEYGCV
VNLRKTVVNFPVEDEALGGTAFVQMPAHGLFPWCGLLLDTRTLEVQSDYSSYARTSIR
ASLTFNRGFKAGRNMRRKLFGVLRLKCHSLFLDLQVNSLQTVCTNIYKILLLQAYRFHA
CVLQLPFHQQVVVKNPTFFLRVISDTASLCYSILKAKNAGMSLGAKGAAGPLPSEAVQW
LCHQAFLLKLTRHRVTYVPLLGSLRTAQTQLSRKLPGTTLTALEAAANPALPSDFKTILD
SEQ ID NO: 45-Plasmid 1318 ORF
atggctagcacccctggaacccagagccccttcttccttctgctgctgctgaccgtgctgactgtcgtgacaggctctggcca
cgccagctctacacctggcggcgagaaagagacaagcgccacccagagaagcagcgtgccaagcagcaccgaga
agaacgccgtgtccatgaccagctccgtgctgagcagccactctcctggcagcggcagcagcacaacacagggccag
gatgtgacactggcccctgccacagaacctgcctctggatctgccgccacctggggacaggacgtgacaagcgtgccag
tgaccagacctgccctgggctctacaacaccccctgcccacgatgtgaccagcgcccctgataacaagcctgcccctgg
aagcacagcccctccagctcatggcgtgacctctgccccagataccagaccagccccaggatctacagccccacccgc
acacggcgtgacaagtgcccctgacacaagacccgctccaggctctactgctcctcctgcccatggcgtgacaagcgctc
ccgatacaaggccagctcctggctccacagcaccaccagcacatggcgtgacatcagctcccgacactagacctgctcc
cggatcaaccgctccaccagctcacggcgtgaccagcgcacctgataccagacctgctctgggaagcaccgcccctcc
cgtgcacaatgtgacatctgcttccggcagcgccagcggctctgcctctacactggtgcacaacggcaccagcgccaga
gccacaacaaccccagccagcaagagcacccccttcagcatccctagccaccacagcgacacccctaccacactggc
cagccactccaccaagaccgatgcctctagcacccaccactccagcgtgccccctctgaccagcagcaaccacagcac
aagcccccagctgtctaccggcgtctcattcttctttctgtccttccacatcagcaacctgcagttcaacagcagcctggaag
atcccagcaccgactactaccaggaactgcagcgggatatcagcgagatgttcctgcaaatctacaagcagggcggctt
cctgggcctgagcaacatcaagttcagacccggcagcgtggtggtgcagctgaccctggctttccgggaaggcaccatc
aacgtgcacgacgtggaaacccagttcaaccagtacaagaccgaggccgccagccggtacaacctgaccatctccgat
gtgtccgtgtccgacgtgcccttcccattctctgcccagtctggcgcaggcgtgccaggatggggaattgctctgctggtgctc
gtgtgcgtgctggtggccctggccatcgtgtatctgattgccctggccgtgtgccagtgccggcggaagaattacggccagc
tggacatcttccccgccagagacacctaccaccccatgagcgagtaccccacataccacacccacggcagatacgtgc
cacccagctccaccgacagatccccctacgagaaagtgtctgccggcaacggcggcagctccctgagctacacaaatc
ctgccgtggccgctgcctccgccaacctgggatccggcacaatcctgtctgagggcgccaccaacttcagcctgctgaaa
ctggccggcgacgtggaactgaaccctggccctggagctgccccggagccggagaggacccccgttggccagggatc
gtgggcccatccgggacgcaccaggggaccatccgacaggggattctgtgtggtgtcaccggccaggccagcagaag
aggcaaccagcctcgagggagcgttgtctggaaccagacattcccacccgtcggtgggccggcagcaccacgcggga
ccaccgtccacttccagaccgccacggccatgggacaccccttgcccgcctgtgtatgccgagactaaacacttcctgtac
tcatccggagacaaggaacagcttcggccgtccttcctcctgtcgtcgctcagaccgagcctgaccggagcacgcagatt
ggtggaaactatcttccttgggtcacgtccgtggatgccaggtaccccacggcgcctcccgcgcctcccacagagatactg
gcagatgcggcctctgttcctggaattgctgggaaaccacgctcagtgcccgtacggagtcctgctcaagactcactgccct
ctgagggcggcggtcactccggcggccggagtgtgcgcacgggagaagccccagggaagcgtggcagctccggaag
aggaggacaccgatccgcgccgcctcgtgcaacttctgcgccagcactcctcgccctggcaagtctacgggttcgtccgc
gcctgcctgcgccgcctggtgccgcctgggctctggggttcccggcataacgagcgccgcttcctgagaaatactaagaa
gtttatctcacttggaaaacatgccaagttgtcgctgcaagaactcacgtggaagatgtcagtccgcgattgcgcctggctg
cgccgctcgccgggcgtcgggtgtgttccagctgcagaacaccgcctgagagaagaaattctggccaaatttctgcattgg
ctgatgtcagtgtacgtggtcgagctgctgcgctcctttttctacgtcactgagactacctttcaaaagaaccgcctgttcttcta
ccgcaaatctgtgtggagcaagctgcagtcaatcggcattcgccagcatctgaagagggtgcagctgcgggaactttccg
aggcagaagtccgccagcaccgggaggcccggccggcgcttctcacgtcgcgtctgagattcatcccaaagcccgacg
ggctgaggcctatcgtcaacatggattacgtcgtgggcgctcgcacctttcgccgtgaaaagcgggccgaacgcttgacct
cacgggtgaaggccctcttctccgtgctgaactacgagagagcaagacggcctggcctgctgggagcttcggtgctggga
ctggacgatatccaccgggcttggcggacctttgttctccgggtgagagcccaagaccctccgccggaactgtacttcgtg
aaggtggcgatcaccggagcctatgatactattccgcaagatcgactcaccgaagtcatcgcctcgatcatcaaaccgca
gaacacttactgcgtcaggcggtacgccgtggtccagaaggccgcgcatggccacgtgagaaaggcgttcaagtcgca
cgtgtccactctcaccgacctccagccttacatgaggcaattcgttgcgcatttgcaagagacttcgcccctgagagatgcg
gtggtcatcgagcagagctccagcctgaacgaagcgagcagcggtctgtttgacgtgttcctccgcttcatgtgtcatcacg
cggtgcgaatcaggggaaaatcatacgtgcagtgccagggaatcccacaaggcagcattctgtcgactctcttgtgttccct
ttgctacggcgatatggaaaacaagctgttcgctgggatcagacgggacgggttgctgctcagactggtggacgacttcct
gctggtgactccgcacctcactcacgccaaaacctttctccgcactctggtgaggggagtgccagaatacggctgtgtggt
caatctccggaaaactgtggtgaatttccctgtcgaggatgaggcactcggaggaaccgcatttgtccaaatgccagcac
atggcctgttcccatggtgcggtctgctgctggacacccgaactcttgaagtgcagtccgactactccagctatgcccggac
gagcatccgcgccagcctcactttcaatcgcggctttaaggccggacgaaacatgcgcagaaagcttttcggagtcctcc
ggcttaaatgccattcgctctttctcgatctccaagtcaattcgctgcagaccgtgtgcacgaacatctacaagatcctgctgc
tccaagcctaccggttccacgcttgcgtgcttcagctgccgtttcaccaacaggtgtggaagaacccgaccttctttctgcgg
gtcattagcgatactgcctccctgtgttactcaatcctcaaggcaaagaacgccggaatgtcgctgggtgcgaaaggagcc
gcgggacctcttcctagcgaagcggtgcagtggctctgccaccaggctttcctcctgaagctgaccaggcacagagtgac
ctacgtcccgctgctgggctcgctgcgcactgcacagacccagctgtctagaaaactccccggcaccaccctgaccgctc
tggaagccgccgccaacccagcattgccgtcagatttcaagaccatcttggacggatccggcgagggcagaggcagcc
tgctgacatgtggcgacgtggaagagaaccctggccccctggctggcgagacaggacaggaagccgctcctctggacg
gcgtgctggccaaccctcccaatatcagcagcctgagccccagacagctgctgggattcccttgtgccgaggtgtccggc
ctgagcacagagagagtgcgggaactggctgtggccctggcccagaaaaacgtgaagctgagcaccgagcagctgc
ggtgcctggcccacagactgtctgagcctcccgaggatctggacgccctgcctctggatctgctgctgttcctgaaccccga
cgccttcagcggacctcaggcctgcacccggttcttcagcagaatcaccaaggccaacgtggacctgctgcccagaggc
gcccctgagagacagagactgctgcctgctgctctggcctgttggggagtgcggggctctctgctgtctgaagctgatgtgc
gggccctgggaggcctggcttgtgatctgcctggaagattcgtggccgagagcgccgaagtgctgctgcctagactggtgt
cctgtcccggccctctggaccaggatcagcaggaagctgccagagctgctctgcagggcggaggccctccttatggacct
cctagcacttggagcgtgtccaccatggatgccctgaggggcctgctgccagtgctgggccagcctatcatcagatccatc
ccacagggcatcgtggccgcctggcggcagagaagctctagagatccctcttggcggcagcccgagcggacaatcctg
cggcccaggtttcggagagaggtggaaaagaccgcctgcccctctggcaagaaggccagagagatcgacgagagcc
tgatcttctacaagaagtgggagctggaagcctgcgtggacgccgctctgctggccacccagatggacagagtgaacgc
catccccttcacctatgagcagctggacgtgctgaagcacaagctggatgagctgtacccccagggctaccccgagagc
gtgatccagcacctgggctacctgtttctgaagatgagccccgaggacatccggaagtggaacgtgaccagcctggaaa
ccctgaaggccctgctggaagtgaacaagggccacgagatgtccccccaggtggccacactgatcgacagattcgtga
agggcagaggccagctggacaaggacaccctggatacactgaccgccttctaccccggctatctgtgcagcctgtcccc
cgaggaactgagcagcgtgccacctagctctatctgggctgtgcggccccaggacctggatacctgcgatcctagacag
ctggatgtgctgtatcccaaggcccggctggccttccagaacatgaacggcagcgagtacttcgtgaagatccagtccttc
ctgggcggagcccctaccgaggacctgaaagctctgagccagcagaacgtgtccatggatctggccacctttatgaagct
gcggaccgacgccgtgctgcctctgacagtggctgaggtgcagaaactgctgggcccccatgtggaagggctgaaggc
cgaagaacggcacagacccgtgcgcgactggatcctgaggcagagacaggatgacctggacacactgggcctggga
ctgcaggggggcatccctaatggctacctggtgctggacctgagcatgcaggaagccctg
SEQ ID NO: 46-Plasmid 1318 Polypeptide
MASTPGTQSPFFLLLLLTVLTVVTGSGHASSTPGGEKETSATQRSSVPSSTEKNAVSM
TSSVLSSHSPGSGSSTTQGQDVTLAPATEPASGSAATWGQDVTSVPVTRPALGSTTP
PAHDVTSAPDNKPAPGSTAPPAHGVTSAPDTRPAPGSTAPPAHGVTSAPDTRPAPGS
TAPPAHGVTSAPDTRPAPGSTAPPAHGVTSAPDTRPAPGSTAPPAHGVTSAPDTRPAL
GSTAPPVHNVTSASGSASGSASTLVHNGTSARATTTPASKSTPFSIPSHHSDTPTTLAS
HSTKTDASSTHHSSVPPLTSSNHSTSPQLSTGVSFFFLSFHISNLQFNSSLEDPSTDYY
QELQRDISEMFLQIYKQGGFLGLSNIKFRPGSVVVQLTLAFREGTINVHDVETQFNQYK
TEAASRYNLTISDVSVSDVPFPFSAQSGAGVPGWGIALLVLVCVLVALAIVYLIALAVCQ
CRRKNYGQLDIFPARDTYHPMSEYPTYHTHGRYVPPSSTDRSPYEKVSAGNGGSSLS
YTNPAVAAASANLGSGTILSEGATNFSLLKLAGDVELNPGPGAAPEPERTPVGQGSWA
HPGRTRGPSDRGFCWSPARPAEEATSLEGALSGTRHSHPSVGRQHHAGPPSTSRP
PRPWDTPCPPVYAETKHFLYSSGDKEQLRPSFLLSSLRPSLTGARRLVETIFLGSRPW
MPGTPRRLPRLPQRYWQMRPLFLELLGNHAQCPYGVLLKTHCPLRAAVTPAAGVCAR
EKPQGSVAAPEEEDTDPRRLVQLLRQHSSPWQVYGFVRACLRRLVPPGLWGSRHNE
RRFLRNTKKFISLGKHAKLSLQELTWKMSVRDCAWLRRSPGVGCVPAAEHRLREEILA
KFLHWLMSVYVVELLRSFFYVTETTFQKNRLFFYRKSVWSKLQSIGIRQHLKRVQLREL
SEAEVRQHREARPALLTSRLRFIPKPDGLRPIVNMDYVVGARTFRREKRAERLTSRVKA
LFSVLNYERARRPGLLGASVLGLDDIHRAWRTFVLRVRAQDPPPELYFVKVAITGAYDT
IPQDRLTEVIASIIKPQNTYCVRRYAVVQKAAHGHVRKAFKSHVSTLTDLQPYMRQFVA
HLQETSPLRDAVVIEQSSSLNEASSGLFDVFLRFMCHHAVRIRGKSYVQCQGIPQGSIL
STLLCSLCYGDMENKLFAGIRRDGLLLRLVDDFLLVTPHLTHAKTFLRTLVRGVPEYGC
WNLRKTVVNFPVEDEALGGTAFVQMPAHGLFPWCGLLLDTRTLEVQSDYSSYARTSI
RASLTFNRGFKAGRNMRRKLFGVLRLKCHSLFLDLQVNSLQTVCTNIYKILLLQAYRFH
ACVLQLPFHQQVWKNPTFFLRVISDTASLCYSILKAKNAGMSLGAKGAAGPLPSEAVQ
WLCHQAFLLKLTRHRVTYVPLLGSLRTAQTQLSRKLPGTTLTALEAAANPALPSDFKTIL
DGSGEGRGSLLTCGDVEENPGPLAGETGQEAAPLDGVLANPPNISSLSPRQLLGFPC
AEVSGLSTERVRELAVALAQKNVKLSTEQLRCLAHRLSEPPEDLDALPLDLLLFLNPDA
FSGPQACTRFFSRITKANVDLLPRGAPERQRLLPAALACWGVRGSLLSEADVRALGGL
ACDLPGRFVAESAEVLLPRLVSCPGPLDQDQQEAARAALQGGGPPYGPPSTWSVST
MDALRGLLPVLGQPIIRSIPQGIVAAWRQRSSRDPSWRQPERTILRPRFRREVEKTACP
SGKKAREIDESLIFYKKWELEACVDAALLATQMDRVNAIPFTYEQLDVLKHKLDELYPQ
GYPESVIQHLGYLFLKMSPEDIRKWNVTSLETLKALLEVNKGHEMSPQVATLIDRFVKG
RGQLDKDTLDTLTAFYPGYLCSLSPEELSSVPPSSIWAVRPQDLDTCDPRQLDVLYPK
ARLAFQNMNGSEYFVKIQSFLGGAPTEDLKALSQQNVSMDLATFMKLRTDAVLPLTVA
EVQKLLGPHVEGLKAEERHRPVRDWILRQRQDDLDTLGLGLQGGIPNGYLVLDLSMQ
EAL
SEQ ID NO: 47-Plasmid 1319 ORF
atggctagcctggctggcgagacaggacaggaagccgctcctctggacggcgtgctggccaaccctcccaatatcagc
agcctgagccccagacagctgctgggattcccttgtgccgaggtgtccggcctgagcacagagagagtgcgggaactgg
ctgtggccctggcccagaaaaacgtgaagctgagcaccgagcagctgcggtgcctggcccacagactgtctgagcctcc
cgaggatctggacgccctgcctctggatctgctgctgttcctgaaccccgacgccttcagcggacctcaggcctgcacccg
gttcttcagcagaatcaccaaggccaacgtggacctgctgcccagaggcgcccctgagagacagagactgctgcctgct
gctctggcctgttggggagtgcggggctctctgctgtctgaagctgatgtgcgggccctgggaggcctggcttgtgatctgcc
tggaagattcgtggccgagagcgccgaagtgctgctgcctagactggtgtcctgtcccggccctctggaccaggatcagc
aggaagctgccagagctgctctgcagggcggaggccctccttatggacctcctagcacttggagcgtgtccaccatggat
gccctgaggggcctgctgccagtgctgggccagcctatcatcagatccatcccacagggcatcgtggccgcctggcggc
agagaagctctagagatccctcttggcggcagcccgagcggacaatcctgcggcccaggtttcggagagaggtggaaa
agaccgcctgcccctctggcaagaaggccagagagatcgacgagagcctgatcttctacaagaagtgggagctggaa
gcctgcgtggacgccgctctgctggccacccagatggacagagtgaacgccatccccttcacctatgagcagctggacgt
gctgaagcacaagctggatgagctgtacccccagggctaccccgagagcgtgatccagcacctgggctacctgtttctga
agatgagccccgaggacatccggaagtggaacgtgaccagcctggaaaccctgaaggccctgctggaagtgaacaa
gggccacgagatgtccccccaggtggccacactgatcgacagattcgtgaagggcagaggccagctggacaaggaca
ccctggatacactgaccgccttctaccccggctatctgtgcagcctgtcccccgaggaactgagcagcgtgccacctagct
ctatctgggctgtgcggccccaggacctggatacctgcgatcctagacagctggatgtgctgtatcccaaggcccggctgg
ccttccagaacatgaacggcagcgagtacttcgtgaagatccagtccttcctgggcggagcccctaccgaggacctgaa
agctctgagccagcagaacgtgtccatggatctggccacctttatgaagctgcggaccgacgccgtgctgcctctgacagt
ggctgaggtgcagaaactgctgggcccccatgtggaagggctgaaggccgaagaacggcacagacccgtgcgcgac
tggatcctgaggcagagacaggatgacctggacacactgggcctgggactgcaggggggcatccctaatggctacctg
gtgctggacctgagcatgcaggaagccctgggatccggcagaatcttcaacgcccactacgccggctacttcgccgacct
gctgatccacgacatcgagacaaaccctggccccacccctggaacccagagccccttcttccttctgctgctgctgaccgt
gctgactgtcgtgacaggctctggccacgccagctctacacctggcggcgagaaagagacaagcgccacccagagaa
gcagcgtgccaagcagcaccgagaagaacgccgtgtccatgaccagctccgtgctgagcagccactctcctggcagcg
gcagcagcacaacacagggccaggatgtgacactggcccctgccacagaacctgcctctggatctgccgccacctggg
gacaggacgtgacaagcgtgccagtgaccagacctgccctgggctctacaacaccccctgcccacgatgtgaccagcg
cccctgataacaagcctgcccctggaagcacagcccctccagctcatggcgtgacctctgccccagataccagaccagc
cccaggatctacagccccacccgcacacggcgtgacaagtgcccctgacacaagacccgctccaggctctactgctcct
cctgcccatggcgtgacaagcgctcccgatacaaggccagctcctggctccacagcaccaccagcacatggcgtgaca
tcagctcccgacactagacctgctcccggatcaaccgctccaccagctcacggcgtgaccagcgcacctgataccagac
ctgctctgggaagcaccgcccctcccgtgcacaatgtgacatctgcttccggcagcgccagcggctctgcctctacactggt
gcacaacggcaccagcgccagagccacaacaaccccagccagcaagagcacccccttcagcatccctagccacca
cagcgacacccctaccacactggccagccactccaccaagaccgatgcctctagcacccaccactccagcgtgccccc
tctgaccagcagcaaccacagcacaagcccccagctgtctaccggcgtctcattcttctttctgtccttccacatcagcaacc
tgcagttcaacagcagcctggaagatcccagcaccgactactaccaggaactgcagcgggatatcagcgagatgttcct
gcaaatctacaagcagggcggcttcctgggcctgagcaacatcaagttcagacccggcagcgtggtggtgcagctgacc
ctggctttccgggaaggcaccatcaacgtgcacgacgtggaaacccagttcaaccagtacaagaccgaggccgccag
ccggtacaacctgaccatctccgatgtgtccgtgtccgacgtgcccttcccattctctgcccagtctggcgcaggcgtgccag
gatggggaattgctctgctggtgctcgtgtgcgtgctggtggccctggccatcgtgtatctgattgccctggccgtgtgccagt
gccggcggaagaattacggccagctggacatcttccccgccagagacacctaccaccccatgagcgagtaccccacat
accacacccacggcagatacgtgccacccagctccaccgacagatccccctacgagaaagtgtctgccggcaacggc
ggcagctccctgagctacacaaatcctgccgtggccgctgcctccgccaacctgggatccggcacaatcctgtctgaggg
cgccaccaacttcagcctgctgaaactggccggcgacgtggaactgaaccctggccctggagctgccccggagccgga
gaggacccccgttggccagggatcgtgggcccatccgggacgcaccaggggaccatccgacaggggattctgtgtggt
gtcaccggccaggccagcagaagaggcaaccagcctcgagggagcgttgtctggaaccagacattcccacccgtcgg
tgggccggcagcaccacgcgggaccaccgtccacttccagaccgccacggccatgggacaccccttgcccgcctgtgt
atgccgagactaaacacttcctgtactcatccggagacaaggaacagcttcggccgtccttcctcctgtcgtcgctcagacc
gagcctgaccggagcacgcagattggtggaaactatcttccttgggtcacgtccgtggatgccaggtaccccacggcgcc
tcccgcgcctcccacagagatactggcagatgcggcctctgttcctggaattgctgggaaaccacgctcagtgcccgtacg
gagtcctgctcaagactcactgccctctgagggcggcggtcactccggcggccggagtgtgcgcacgggagaagcccc
agggaagcgtggcagctccggaagaggaggacaccgatccgcgccgcctcgtgcaacttctgcgccagcactcctcgc
cctggcaagtctacgggttcgtccgcgcctgcctgcgccgcctggtgccgcctgggctctggggttcccggcataacgagc
gccgcttcctgagaaatactaagaagtttatctcacttggaaaacatgccaagttgtcgctgcaagaactcacgtggaagat
gtcagtccgcgattgcgcctggctgcgccgctcgccgggcgtcgggtgtgttccagctgcagaacaccgcctgagagaa
gaaattctggccaaatttctgcattggctgatgtcagtgtacgtggtcgagctgctgcgctcctttttctacgtcactgagactac
ctttcaaaagaaccgcctgttcttctaccgcaaatctgtgtggagcaagctgcagtcaatcggcattcgccagcatctgaag
agggtgcagctgcgggaactttccgaggcagaagtccgccagcaccgggaggcccggccggcgcttctcacgtcgcgt
ctgagattcatcccaaagcccgacgggctgaggcctatcgtcaacatggattacgtcgtgggcgctcgcacctttcgccgt
gaaaagcgggccgaacgcttgacctcacgggtgaaggccctcttctccgtgctgaactacgagagagcaagacggcct
ggcctgctgggagcttcggtgctgggactggacgatatccaccgggcttggcggacctttgttctccgggtgagagcccaa
gaccctccgccggaactgtacttcgtgaaggtggcgatcaccggagcctatgatactattccgcaagatcgactcaccga
agtcatcgcctcgatcatcaaaccgcagaacacttactgcgtcaggcggtacgccgtggtccagaaggccgcgcatggc
cacgtgagaaaggcgttcaagtcgcacgtgtccactctcaccgacctccagccttacatgaggcaattcgttgcgcatttgc
aagagacttcgcccctgagagatgcggtggtcatcgagcagagctccagcctgaacgaagcgagcagcggtctgtttga
cgtgttcctccgcttcatgtgtcatcacgcggtgcgaatcaggggaaaatcatacgtgcagtgccagggaatcccacaagg
cagcattctgtcgactctcttgtgttccctttgctacggcgatatggaaaacaagctgttcgctgggatcagacgggacgggtt
gctgctcagactggtggacgacttcctgctggtgactccgcacctcactcacgccaaaacctttctccgcactctggtgagg
ggagtgccagaatacggctgtgtggtcaatctccggaaaactgtggtgaatttccctgtcgaggatgaggcactcggagg
aaccgcatttgtccaaatgccagcacatggcctgttcccatggtgcggtctgctgctggacacccgaactcttgaagtgcag
tccgactactccagctatgcccggacgagcatccgcgccagcctcactttcaatcgcggctttaaggccggacgaaacat
gcgcagaaagcttttcggagtcctccggcttaaatgccattcgctctttctcgatctccaagtcaattcgctgcagaccgtgtg
cacgaacatctacaagatcctgctgctccaagcctaccggttccacgcttgcgtgcttcagctgccgtttcaccaacaggtgt
ggaagaacccgaccttctttctgcgggtcattagcgatactgcctccctgtgttactcaatcctcaaggcaaagaacgccgg
aatgtcgctgggtgcgaaaggagccgcgggacctcttcctagcgaagcggtgcagtggctctgccaccaggctttcctcct
gaagctgaccaggcacagagtgacctacgtcccgctgctgggctcgctgcgcactgcacagacccagctgtctagaaa
actccccggcaccaccctgaccgctctggaagccgccgccaacccagcattgccgtcagatttcaagaccatcttggac
SEQ ID NO: 48-Plasmid 1319 Polypeptide
MASLAGETGQEAAPLDGVLANPPNISSLSPRQLLGFPCAEVSGLSTERVRELAVALAQ
KNVKLSTEQLRCLAHRLSEPPEDLDALPLDLLLFLNPDAFSGPQACTRFFSRITKANVDL
LPRGAPERQRLLPAALACWGVRGSLLSEADVRALGGLACDLPGRFVAESAEVLLPRLV
SCPGPLDQDQQEAARAALQGGGPPYGPPSTWSVSTMDALRGLLPVLGQPIIRSIPQGI
VAAWRQRSSRDPSWRQPERTILRPRFRREVEKTACPSGKKAREIDESLIFYKKWELEA
CVDAALLATQMDRVNAIPFTYEQLDVLKHKLDELYPQGYPESVIQHLGYLFLKMSPEDI
RKWNVTSLETLKALLEVNKGHEMSPQVATLIDRFVKGRGQLDKDTLDTLTAFYPGYLC
SLSPEELSSVPPSSIWAVRPQDLDTCDPRQLDVLYPKARLAFQNMNGSEYFVKIQSFL
GGAPTEDLKALSQQNVSMDLATFMKLRTDAVLPLTVAEVQKLLGPHVEGLKAEERHRP
VRDWILRQRQDDLDTLGLGLQGGIPNGYLVLDLSMQEALGSGRIFNAHYAGYFADLLIH
DIETNPGPTPGTQSPFFLLLLLTVLTVVTGSGHASSTPGGEKETSATQRSSVPSSTEKN
AVSMTSSVLSSHSPGSGSSTTQGQDVTLAPATEPASGSAATWGQDVTSVPVTRPALG
STTPPAHDVTSAPDNKPAPGSTAPPAHGVTSAPDTRPAPGSTAPPAHGVTSAPDTRP
APGSTAPPAHGVTSAPDTRPAPGSTAPPAHGVTSAPDTRPAPGSTAPPAHGVTSAPD
TRPALGSTAPPVHNVTSASGSASGSASTLVHNGTSARATTTPASKSTPFSIPSHHSDTP
TTLASHSTKTDASSTHHSSVPPLTSSNHSTSPQLSTGVSFFFLSFHISNLQFNSSLEDPS
TDYYQELQRDISEMFLQIYKQGGFLGLSNIKFRPGSVVVQLTLAFREGTINVHDVETQF
NQYKTEAASRYNLTISDVSVSDVPFPFSAQSGAGVPGWGIALLVLVCVLVALAIVYLIAL
AVCQCRRKNYGQLDIFPARDTYHPMSEYPTYHTHGRYVPPSSTDRSPYEKVSAGNGG
SSLSYTNPAVAAASANLGSGTILSEGATNFSLLKLAGDVELNPGPGAAPEPERTPVGQ
GSWAHPGRTRGPSDRGFCWSPARPAEEATSLEGALSGTRHSHPSVGRQHHAGPPS
TSRPPRPWDTPCPPVYAETKHFLYSSGDKEQLRPSFLLSSLRPSLTGARRLVETIFLGS
RPWMPGTPRRLPRLPQRYWQMRPLFLELLGNHAQCPYGVLLKTHCPLRAAVTPAAGV
CAREKPQGSVAAPEEEDTDPRRLVQLLRQHSSPWQVYGFVRACLRRLVPPGLWGSR
HNERRFLRNTKKFISLGKHAKLSLQELTWKMSVRDCAWLRRSPGVGCVPAAEHRLRE
EILAKFLHWLMSVYVVELLRSFFYVTETTFQKNRLFFYRKSVVVSKLQSIGIRQHLKRVQL
RELSEAEVRQHREARPALLTSRLRFIPKPDGLRPIVNMDYVVGARTFRREKRAERLTSR
VKALFSVLNYERARRPGLLGASVLGLDDIHRAWRTFVLRVRAQDPPPELYFVKVAITGA
YDTIPQDRLTEVIASIIKPQNTYCVRRYAVVQKAAHGHVRKAFKSHVSTLTDLQPYMRQ
FVAHLQETSPLRDAVVIEQSSSLNEASSGLFDVFLRFMCHHAVRIRGKSYVQCQGIPQ
GSILSTLLCSLCYGDMENKLFAGIRRDGLLLRLVDDFLLVTPHLTHAKTFLRTLVRGVPE
YGCVVNLRKTVVNFPVEDEALGGTAFVQMPAHGLFPWCGLLLDTRTLEVQSDYSSYA
RTSIRASLTFNRGFKAGRNMRRKLFGVLRLKCHSLFLDLQVNSLQTVCTNIYKILLLQAY
RFHACVLQLPFHQQVWKNPTFFLRVISDTASLCYSILKAKNAGMSLGAKGAAGPLPSE
AVQWLCHQAFLLKLTRHRVTYVPLLGSLRTAQTQLSRKLPGTTLTALEAAANPALPSDF
KTILD
SEQ ID NO: 49-Plasmid 1320 ORF
atggctagcctggctggcgagacaggacaggaagccgctcctctggacggcgtgctggccaaccctcccaatatcagc
agcctgagccccagacagctgctgggattcccttgtgccgaggtgtccggcctgagcacagagagagtgcgggaactgg
ctgtggccctggcccagaaaaacgtgaagctgagcaccgagcagctgcggtgcctggcccacagactgtctgagcctcc
cgaggatctggacgccctgcctctggatctgctgctgttcctgaaccccgacgccttcagcggacctcaggcctgcacccg
gttcttcagcagaatcaccaaggccaacgtggacctgctgcccagaggcgcccctgagagacagagactgctgcctgct
gctctggcctgttggggagtgcggggctctctgctgtctgaagctgatgtgcgggccctgggaggcctggcttgtgatctgcc
tggaagattcgtggccgagagcgccgaagtgctgctgcctagactggtgtcctgtcccggccctctggaccaggatcagc
aggaagctgccagagctgctctgcagggcggaggccctccttatggacctcctagcacttggagcgtgtccaccatggat
gccctgaggggcctgctgccagtgctgggccagcctatcatcagatccatcccacagggcatcgtggccgcctggcggc
agagaagctctagagatccctcttggcggcagcccgagcggacaatcctgcggcccaggtttcggagagaggtggaaa
agaccgcctgcccctctggcaagaaggccagagagatcgacgagagcctgatcttctacaagaagtgggagctggaa
gcctgcgtggacgccgctctgctggccacccagatggacagagtgaacgccatccccttcacctatgagcagctggacgt
gctgaagcacaagctggatgagctgtacccccagggctaccccgagagcgtgatccagcacctgggctacctgtttctga
agatgagccccgaggacatccggaagtggaacgtgaccagcctggaaaccctgaaggccctgctggaagtgaacaa
gggccacgagatgtccccccaggtggccacactgatcgacagattcgtgaagggcagaggccagctggacaaggaca
ccctggatacactgaccgccttctaccccggctatctgtgcagcctgtcccccgaggaactgagcagcgtgccacctagct
ctatctgggctgtgcggccccaggacctggatacctgcgatcctagacagctggatgtgctgtatcccaaggcccggctgg
ccttccagaacatgaacggcagcgagtacttcgtgaagatccagtccttcctgggcggagcccctaccgaggacctgaa
agctctgagccagcagaacgtgtccatggatctggccacctttatgaagctgcggaccgacgccgtgctgcctctgacagt
ggctgaggtgcagaaactgctgggcccccatgtggaagggctgaaggccgaagaacggcacagacccgtgcgcgac
tggatcctgaggcagagacaggatgacctggacacactgggcctgggactgcaggggggcatccctaatggctacctg
gtgctggacctgagcatgcaggaagccctgggatccggcgagggcagaggcagcctgctgacatgtggcgacgtgga
agagaaccctggccccggagctgccccggagccggagaggacccccgttggccagggatcgtgggcccatccggga
cgcaccaggggaccatccgacaggggattctgtgtggtgtcaccggccaggccagcagaagaggcaaccagcctcga
gggagcgttgtctggaaccagacattcccacccgtcggtgggccggcagcaccacgcgggaccaccgtccacttccag
accgccacggccatgggacaccccttgcccgcctgtgtatgccgagactaaacacttcctgtactcatccggagacaagg
aacagcttcggccgtccttcctcctgtcgtcgctcagaccgagcctgaccggagcacgcagattggtggaaactatcttcctt
gggtcacgtccgtggatgccaggtaccccacggcgcctcccgcgcctcccacagagatactggcagatgcggcctctgtt
cctggaattgctgggaaaccacgctcagtgcccgtacggagtcctgctcaagactcactgccctctgagggcggcggtca
ctccggcggccggagtgtgcgcacgggagaagccccagggaagcgtggcagctccggaagaggaggacaccgatc
cgcgccgcctcgtgcaacttctgcgccagcactcctcgccctggcaagtctacgggttcgtccgcgcctgcctgcgccgcct
ggtgccgcctgggctctggggttcccggcataacgagcgccgcttcctgagaaatactaagaagtttatctcacttggaaa
acatgccaagttgtcgctgcaagaactcacgtggaagatgtcagtccgcgattgcgcctggctgcgccgctcgccgggcg
tcgggtgtgttccagctgcagaacaccgcctgagagaagaaattctggccaaatttctgcattggctgatgtcagtgtacgtg
gtcgagctgctgcgctcctttttctacgtcactgagactacctttcaaaagaaccgcctgttcttctaccgcaaatctgtgtgga
gcaagctgcagtcaatcggcattcgccagcatctgaagagggtgcagctgcgggaactttccgaggcagaagtccgcca
gcaccgggaggcccggccggcgcttctcacgtcgcgtctgagattcatcccaaagcccgacgggctgaggcctatcgtc
aacatggattacgtcgtgggcgctcgcacctttcgccgtgaaaagcgggccgaacgcttgacctcacgggtgaaggccct
cttctccgtgctgaactacgagagagcaagacggcctggcctgctgggagcttcggtgctgggactggacgatatccacc
gggcttggcggacctttgttctccgggtgagagcccaagaccctccgccggaactgtacttcgtgaaggtggcgatcaccg
gagcctatgatactattccgcaagatcgactcaccgaagtcatcgcctcgatcatcaaaccgcagaacacttactgcgtca
ggcggtacgccgtggtccagaaggccgcgcatggccacgtgagaaaggcgttcaagtcgcacgtgtccactctcaccg
acctccagccttacatgaggcaattcgttgcgcatttgcaagagacttcgcccctgagagatgcggtggtcatcgagcaga
gctccagcctgaacgaagcgagcagcggtctgtttgacgtgttcctccgcttcatgtgtcatcacgcggtgcgaatcagggg
aaaatcatacgtgcagtgccagggaatcccacaaggcagcattctgtcgactctcttgtgttccctttgctacggcgatatgg
aaaacaagctgttcgctgggatcagacgggacgggttgctgctcagactggtggacgacttcctgctggtgactccgcacc
tcactcacgccaaaacctttctccgcactctggtgaggggagtgccagaatacggctgtgtggtcaatctccggaaaactgt
ggtgaatttccctgtcgaggatgaggcactcggaggaaccgcatttgtccaaatgccagcacatggcctgttcccatggtgc
ggtctgctgctggacacccgaactcttgaagtgcagtccgactactccagctatgcccggacgagcatccgcgccagcct
cactttcaatcgcggctttaaggccggacgaaacatgcgcagaaagcttttcggagtcctccggcttaaatgccattcgctct
ttctcgatctccaagtcaattcgctgcagaccgtgtgcacgaacatctacaagatcctgctgctccaagcctaccggttccac
gcttgcgtgcttcagctgccgtttcaccaacaggtgtggaagaacccgaccttctttctgcgggtcattagcgatactgcctcc
ctgtgttactcaatcctcaaggcaaagaacgccggaatgtcgctgggtgcgaaaggagccgcgggacctcttcctagcga
agcggtgcagtggctctgccaccaggctttcctcctgaagctgaccaggcacagagtgacctacgtcccgctgctgggctc
gctgcgcactgcacagacccagctgtctagaaaactccccggcaccaccctgaccgctctggaagccgccgccaaccc
agcattgccgtcagatttcaagaccatcttggacggatccggcacaatcctgtctgagggcgccaccaacttcagcctgct
gaaactggccggcgacgtggaactgaaccctggccctacccctggaacccagagccccttcttccttctgctgctgctgac
cgtgctgactgtcgtgacaggctctggccacgccagctctacacctggcggcgagaaagagacaagcgccacccaga
gaagcagcgtgccaagcagcaccgagaagaacgccgtgtccatgaccagctccgtgctgagcagccactctcctggca
gcggcagcagcacaacacagggccaggatgtgacactggcccctgccacagaacctgcctctggatctgccgccacct
ggggacaggacgtgacaagcgtgccagtgaccagacctgccctgggctctacaacaccccctgcccacgatgtgacca
gcgcccctgataacaagcctgcccctggaagcacagcccctccagctcatggcgtgacctctgccccagataccagacc
agccccaggatctacagccccacccgcacacggcgtgacaagtgcccctgacacaagacccgctccaggctctactgc
tcctcctgcccatggcgtgacaagcgctcccgatacaaggccagctcctggctccacagcaccaccagcacatggcgtg
acatcagctcccgacactagacctgctcccggatcaaccgctccaccagctcacggcgtgaccagcgcacctgatacca
gacctgctctgggaagcaccgcccctcccgtgcacaatgtgacatctgcttccggcagcgccagcggctctgcctctacac
tggtgcacaacggcaccagcgccagagccacaacaaccccagccagcaagagcacccccttcagcatccctagcca
ccacagcgacacccctaccacactggccagccactccaccaagaccgatgcctctagcacccaccactccagcgtgcc
ccctctgaccagcagcaaccacagcacaagcccccagctgtctaccggcgtctcattcttctttctgtccttccacatcagca
acctgcagttcaacagcagcctggaagatcccagcaccgactactaccaggaactgcagcgggatatcagcgagatgtt
cctgcaaatctacaagcagggcggcttcctgggcctgagcaacatcaagttcagacccggcagcgtggtggtgcagctg
accctggctttccgggaaggcaccatcaacgtgcacgacgtggaaacccagttcaaccagtacaagaccgaggccgcc
agccggtacaacctgaccatctccgatgtgtccgtgtccgacgtgcccttcccattctctgcccagtctggcgcaggcgtgcc
aggatggggaattgctctgctggtgctcgtgtgcgtgctggtggccctggccatcgtgtatctgattgccctggccgtgtgcca
gtgccggcggaagaattacggccagctggacatcttccccgccagagacacctaccaccccatgagcgagtaccccac
ataccacacccacggcagatacgtgccacccagctccaccgacagatccccctacgagaaagtgtctgccggcaacg
gcggcagctccctgagctacacaaatcctgccgtggccgctgcctccgccaacctg
SEQ ID NO: 50-Plasmid 1320 Polypeptide
MASLAGETGQEAAPLDGVLANPPNISSLSPRQLLGFPCAEVSGLSTERVRELAVALAQ
KNVKLSTEQLRCLAHRLSEPPEDLDALPLDLLLFLNPDAFSGPQACTRFFSRITKANVDL
LPRGAPERQRLLPAALACWGVRGSLLSEADVRALGGLACDLPGRFVAESAEVLLPRLV
SCPGPLDQDQQEAARAALQGGGPPYGPPSTWSVSTMDALRGLLPVLGQPIIRSIPQGI
VAAWRQRSSRDPSWRQPERTILRPRFRREVEKTACPSGKKAREIDESLIFYKKWELEA
CVDAALLATQMDRVNAIPFTYEQLDVLKHKLDELYPQGYPESVIQHLGYLFLKMSPEDI
RKWNVTSLETLKALLEVNKGHEMSPQVATLIDRFVKGRGQLDKDTLDTLTAFYPGYLC
SLSPEELSSVPPSSIWAVRPQDLDTCDPRQLDVLYPKARLAFQNMNGSEYFVKIQSFL
GGAPTEDLKALSQQNVSMDLATFMKLRTDAVLPLTVAEVQKLLGPHVEGLKAEERHRP
VRDWILRQRQDDLDTLGLGLQGGIPNGYLVLDLSMQEALGSGEGRGSLLTCGDVEEN
PGPGAAPEPERTPVGQGSWAHPGRTRGPSDRGFCVVSPARPAEEATSLEGALSGTR
HSHPSVGRQHHAGPPSTSRPPRPWDTPCPPVYAETKHFLYSSGDKEQLRPSFLLSSL
RPSLTGARRLVETIFLGSRPWMPGTPRRLPRLPQRYWQMRPLFLELLGNHAQCPYGV
LLKTHCPLRAAVTPAAGVCAREKPQGSVAAPEEEDTDPRRLVQLLRQHSSPWQVYGF
VRACLRRLVPPGLWGSRHNERRFLRNTKKFISLGKHAKLSLQELTWKMSVRDCAWLR
RSPGVGCVPAAEHRLREEILAKFLHWLMSVYVVELLRSFFYVTETTFQKNRLFFYRKSV
WSKLQSIGIRQHLKRVQLRELSEAEVRQHREARPALLTSRLRFIPKPDGLRPIVNMDYV
VGARTFRREKRAERLTSRVKALFSVLNYERARRPGLLGASVLGLDDIHRAWRTFVLRV
RAQDPPPELYFVKVAITGAYDTIPQDRLTEVIASIIKPQNTYCVRRYAVVQKAAHGHVRK
AFKSHVSTLTDLQPYMRQFVAHLQETSPLRDAVVIEQSSSLNEASSGLFDVFLRFMCH
HAVRIRGKSYVQCQGIPQGSILSTLLCSLCYGDMENKLFAGIRRDGLLLRLVDDFLLVTP
HLTHAKTFLRTLVRGVPEYGCVVNLRKTVVNFPVEDEALGGTAFVQMPAHGLFPWCG
LLLDTRTLEVQSDYSSYARTSIRASLTFNRGFKAGRNMRRKLFGVLRLKCHSLFLDLQV
NSLQTVCTNIYKILLLQAYRFHACVLQLPFHQQVWKNPTFFLRVISDTASLCYSILKAKN
AGMSLGAKGAAGPLPSEAVQWLCHQAFLLKLTRHRVTYVPLLGSLRTAQTQLSRKLP
GTTLTALEAAANPALPSDFKTILDGSGTILSEGATNFSLLKLAGDVELNPGPTPGTQSPF
FLLLLLTVLTWTGSGHASSTPGGEKETSATQRSSVPSSTEKNAVSMTSSVLSSHSPG
SGSSTTQGQDVTLAPATEPASGSAATWGQDVTSVPVTRPALGSTTPPAHDVTSAPDN
KPAPGSTAPPAHGVTSAPDTRPAPGSTAPPAHGVTSAPDTRPAPGSTAPPAHGVTSA
PDTRPAPGSTAPPAHGVTSAPDTRPAPGSTAPPAHGVTSAPDTRPALGSTAPPVHNV
TSASGSASGSASTLVHNGTSARATTTPASKSTPFSIFSHHSDTPTTLASHSTKTDASST
HHSSVPPLTSSNHSTSPQLSTGVSFFFLSFHISNLQFNSSLEDPSTDYYQELQRDISEM
FLQIYKQGGFLGLSNIKFRPGSVVVQLTLAFREGTINVHDVETQFNQYKTEAASRYNLTI
SDVSVSDVPFPFSAQSGAGVPGWGIALLVLVCVLVALAIVYLIALAVCQCRRKNYGQLD
IFPARDTYHPMSEYPTYHTHGRYVPPSSTDRSPYEKVSAGNGGSSLSYTNPAVAAASA
NL
SEQ ID NO: 51-Plasmid 1321 ORF
atggctagcggagctgccccggagccggagaggacccccgttggccagggatcgtgggcccatccgggacgcacca
ggggaccatccgacaggggattctgtgtggtgtcaccggccaggccagcagaagaggcaaccagcctcgagggagc
gttgtctggaaccagacattcccacccgtcggtgggccggcagcaccacgcgggaccaccgtccacttccagaccgcca
cggccatgggacaccccttgcccgcctgtgtatgccgagactaaacacttcctgtactcatccggagacaaggaacagctt
cggccgtccttcctcctgtcgtcgctcagaccgagcctgaccggagcacgcagattggtggaaactatcttccttgggtcac
gtccgtggatgccaggtaccccacggcgcctcccgcgcctcccacagagatactggcagatgcggcctctgttcctggaa
ttgctgggaaaccacgctcagtgcccgtacggagtcctgctcaagactcactgccctctgagggcggcggtcactccggc
ggccggagtgtgcgcacgggagaagccccagggaagcgtggcagctccggaagaggaggacaccgatccgcgccg
cctcgtgcaacttctgcgccagcactcctcgccctggcaagtctacgggttcgtccgcgcctgcctgcgccgcctggtgccg
cctgggctctggggttcccggcataacgagcgccgcttcctgagaaatactaagaagtttatctcacttggaaaacatgcca
agttgtcgctgcaagaactcacgtggaagatgtcagtccgcgattgcgcctggctgcgccgctcgccgggcgtcgggtgtg
ttccagctgcagaacaccgcctgagagaagaaattctggccaaatttctgcattggctgatgtcagtgtacgtggtcgagct
gctgcgctcctttttctacgtcactgagactacctttcaaaagaaccgcctgttcttctaccgcaaatctgtgtggagcaagctg
cagtcaatcggcattcgccagcatctgaagagggtgcagctgcgggaactttccgaggcagaagtccgccagcaccgg
gaggcccggccggcgcttctcacgtcgcgtctgagattcatcccaaagcccgacgggctgaggcctatcgtcaacatgga
ttacgtcgtgggcgctcgcacctttcgccgtgaaaagcgggccgaacgcttgacctcacgggtgaaggccctcttctccgtg
ctgaactacgagagagcaagacggcctggcctgctgggagcttcggtgctgggactggacgatatccaccgggcttggc
ggacctttgttctccgggtgagagcccaagaccctccgccggaactgtacttcgtgaaggtggcgatcaccggagcctatg
atactattccgcaagatcgactcaccgaagtcatcgcctcgatcatcaaaccgcagaacacttactgcgtcaggcggtac
gccgtggtccagaaggccgcgcatggccacgtgagaaaggcgttcaagtcgcacgtgtccactctcaccgacctccagc
cttacatgaggcaattcgttgcgcatttgcaagagacttcgcccctgagagatgcggtggtcatcgagcagagctccagcct
gaacgaagcgagcagcggtctgtttgacgtgttcctccgcttcatgtgtcatcacgcggtgcgaatcaggggaaaatcata
cgtgcagtgccagggaatcccacaaggcagcattctgtcgactctcttgtgttccctttgctacggcgatatggaaaacaag
ctgttcgctgggatcagacgggacgggttgctgctcagactggtggacgacttcctgctggtgactccgcacctcactcacg
ccaaaacctttctccgcactctggtgaggggagtgccagaatacggctgtgtggtcaatctccggaaaactgtggtgaattt
ccctgtcgaggatgaggcactcggaggaaccgcatttgtccaaatgccagcacatggcctgttcccatggtgcggtctgct
gctggacacccgaactcttgaagtgcagtccgactactccagctatgcccggacgagcatccgcgccagcctcactttca
atcgcggctttaaggccggacgaaacatgcgcagaaagcttttcggagtcctccggcttaaatgccattcgctctttctcgat
ctccaagtcaattcgctgcagaccgtgtgcacgaacatctacaagatcctgctgctccaagcctaccggttccacgcttgcg
tgcttcagctgccgtttcaccaacaggtgtggaagaacccgaccttctttctgcgggtcattagcgatactgcctccctgtgtta
ctcaatcctcaaggcaaagaacgccggaatgtcgctgggtgcgaaaggagccgcgggacctcttcctagcgaagcggt
gcagtggctctgccaccaggctttcctcctgaagctgaccaggcacagagtgacctacgtcccgctgctgggctcgctgcg
cactgcacagacccagctgtctagaaaactccccggcaccaccctgaccgctctggaagccgccgccaacccagcatt
gccgtcagatttcaagaccatcttggacggatccggcgagggcagaggcagcctgctgacatgtggcgacgtggaaga
gaaccctggccccctggctggcgagacaggacaggaagccgctcctctggacggcgtgctggccaaccctcccaatat
cagcagcctgagccccagacagctgctgggattcccttgtgccgaggtgtccggcctgagcacagagagagtgcggga
actggctgtggccctggcccagaaaaacgtgaagctgagcaccgagcagctgcggtgcctggcccacagactgtctga
gcctcccgaggatctggacgccctgcctctggatctgctgctgttcctgaaccccgacgccttcagcggacctcaggcctgc
acccggttcttcagcagaatcaccaaggccaacgtggacctgctgcccagaggcgcccctgagagacagagactgctg
cctgctgctctggcctgttggggagtgcggggctctctgctgtctgaagctgatgtgcgggccctgggaggcctggcttgtga
tctgcctggaagattcgtggccgagagcgccgaagtgctgctgcctagactggtgtcctgtcccggccctctggaccagga
tcagcaggaagctgccagagctgctctgcagggcggaggccctccttatggacctcctagcacttggagcgtgtccacca
tggatgccctgaggggcctgctgccagtgctgggccagcctatcatcagatccatcccacagggcatcgtggccgcctgg
cggcagagaagctctagagatccctcttggcggcagcccgagcggacaatcctgcggcccaggtttcggagagaggtg
gaaaagaccgcctgcccctctggcaagaaggccagagagatcgacgagagcctgatcttctacaagaagtgggagct
ggaagcctgcgtggacgccgctctgctggccacccagatggacagagtgaacgccatccccttcacctatgagcagctg
gacgtgctgaagcacaagctggatgagctgtacccccagggctaccccgagagcgtgatccagcacctgggctacctgt
ttctgaagatgagccccgaggacatccggaagtggaacgtgaccagcctggaaaccctgaaggccctgctggaagtga
acaagggccacgagatgtccccccaggtggccacactgatcgacagattcgtgaagggcagaggccagctggacaag
gacaccctggatacactgaccgccttctaccccggctatctgtgcagcctgtcccccgaggaactgagcagcgtgccacct
agctctatctgggctgtgcggccccaggacctggatacctgcgatcctagacagctggatgtgctgtatcccaaggcccgg
ctggccttccagaacatgaacggcagcgagtacttcgtgaagatccagtccttcctgggcggagcccctaccgaggacct
gaaagctctgagccagcagaacgtgtccatggatctggccacctttatgaagctgcggaccgacgccgtgctgcctctga
cagtggctgaggtgcagaaactgctgggcccccatgtggaagggctgaaggccgaagaacggcacagacccgtgcg
cgactggatcctgaggcagagacaggatgacctggacacactgggcctgggactgcaggggggcatccctaatggcta
cctggtgctggacctgagcatgcaggaagccctgggatccggcagaatcttcaacgcccactacgccggctacttcgccg
acctgctgatccacgacatcgagacaaaccctggccccacccctggaacccagagccccttcttccttctgctgctgctga
ccgtgctgactgtcgtgacaggctctggccacgccagctctacacctggcggcgagaaagagacaagcgccacccaga
gaagcagcgtgccaagcagcaccgagaagaacgccgtgtccatgaccagctccgtgctgagcagccactctcctggca
gcggcagcagcacaacacagggccaggatgtgacactggcccctgccacagaacctgcctctggatctgccgccacct
ggggacaggacgtgacaagcgtgccagtgaccagacctgccctgggctctacaacaccccctgcccacgatgtgacca
gcgcccctgataacaagcctgcccctggaagcacagcccctccagctcatggcgtgacctctgccccagataccagacc
agccccaggatctacagccccacccgcacacggcgtgacaagtgcccctgacacaagacccgctccaggctctactgc
tcctcctgcccatggcgtgacaagcgctcccgatacaaggccagctcctggctccacagcaccaccagcacatggcgtg
acatcagctcccgacactagacctgctcccggatcaaccgctccaccagctcacggcgtgaccagcgcacctgatacca
gacctgctctgggaagcaccgcccctcccgtgcacaatgtgacatctgcttccggcagcgccagcggctctgcctctacac
tggtgcacaacggcaccagcgccagagccacaacaaccccagccagcaagagcacccccttcagcatccctagcca
ccacagcgacacccctaccacactggccagccactccaccaagaccgatgcctctagcacccaccactccagcgtgcc
ccctctgaccagcagcaaccacagcacaagcccccagctgtctaccggcgtctcattcttctttctgtccttccacatcagca
acctgcagttcaacagcagcctggaagatcccagcaccgactactaccaggaactgcagcgggatatcagcgagatgtt
cctgcaaatctacaagcagggcggcttcctgggcctgagcaacatcaagttcagacccggcagcgtggtggtgcagctg
accctggctttccgggaaggcaccatcaacgtgcacgacgtggaaacccagttcaaccagtacaagaccgaggccgcc
agccggtacaacctgaccatctccgatgtgtccgtgtccgacgtgcccttcccattctctgcccagtctggcgcaggcgtgcc
aggatggggaattgctctgctggtgctcgtgtgcgtgctggtggccctggccatcgtgtatctgattgccctggccgtgtgcca
gtgccggcggaagaattacggccagctggacatcttccccgccagagacacctaccaccccatgagcgagtaccccac
ataccacacccacggcagatacgtgccacccagctccaccgacagatccccctacgagaaagtgtctgccggcaacg
gcggcagctccctgagctacacaaatcctgccgtggccgctgcctccgccaacctg
SEQ ID NO: 52-Plasmid 1321 Polypeptide
MASGAAPEPERTPVGQGSWAHPGRTRGPSDRGFCVVSPARPAEEATSLEGALSGTR
HSHPSVGRQHHAGPPSTSRPPRPWDTPCPPVYAETKHFLYSSGDKEQLRPSFLLSSL
RPSLTGARRLVETIFLGSRPWMPGTPRRLPRLPQRYWQMRPLFLELLGNHAQCPYGV
LLKTHCPLRAAVTPAAGVCAREKPQGSVAAPEEEDTDPRRLVQLLRQHSSPWQVYGF
VRACLRRLVPPGLWGSRHNERRFLRNTKKFISLGKHAKLSLQELTWKMSVRDCAWLR
RSPGVGCVPAAEHRLREElLAKFLHWLMSVYVVELLRSFFYVTETTFQKNRLFFYRKSV
WSKLQSIGIRQHLKRVQLRELSEAEVRQHREARPALLTSRLRFIPKPDGLRPIVNMDYV
VGARTFRREKRAERLTSRVKALFSVLNYERARRPGLLGASVLGLDDIHRAWRTFVLRV
RAQDPPPELYFVKVAITGAYDTIPQDRLTEVIASIIKPQNTYCVRRYAVVQKAAHGHVRK
AFKSHVSTLTDLQPYMRQFVAHLQETSPLRDAVVIEQSSSLNEASSGLFDVFLRFMCH
HAVRIRGKSYVQCQGIPQGSILSTLLCSLCYGDMENKLFAGIRRDGLLLRLVDDFLLVTP
HLTHAKTFLRTLVRGVPEYGCVVNLRKTVVNFPVEDEALGGTAFVQMPAHGLFPWCG
LLLDTRTLEVQSDYSSYARTSIRASLTFNRGFKAGRNMRRKLFGVLRLKCHSLFLDLQV
NSLQTVCTNIYKILLLQAYRFHACVLQLPFHQQVWKNPTFFLRVISDTASLCYSILKAKN
AGMSLGAKGAAGPLPSEAVQWLCHQAFLLKLTRHRVTYVPLLGSLRTAQTQLSRKLP
GTTLTALEAAANPALPSDFKTILDGSGEGRGSLLTCGDVEENPGPLAGETGQEAAPLD
GVLANPPNISSLSPRQLLGFPCAEVSGLSTERVRELAVALAQKNVKLSTEQLRCLAHRL
SEPPEDLDALPLDLLLFLNPDAFSGPQACTRFFSRITKANVDLLPRGAPERQRLLPAAL
ACWGVRGSLLSEADVRALGGLACDLPGRFVAESAEVLLPRLVSCPGPLDQDQQEAAR
AALQGGGPPYGPPSTWSVSTMDALRGLLPVLGQPIIRSIPQGIVAAWRQRSSRDPSWR
QPERTILRPRFRREVEKTACPSGKKAREIDESLIFYKKWELEACVDAALLATQMDRVNAI
PFTYEQLDVLKHKLDELYPQGYPESVIQHLGYLFLKMSPEDIRKWNVTSLETLKALLEV
NKGHEMSPQVATLIDRFVKGRGQLDKDTLDTLTAFYPGYLCSLSPEELSSVPPSSIWAV
RPQDLDTCDPRQLDVLYPKARLAFQNMNGSEYFVKIQSFLGGAPTEDLKALSQQNVS
MDLATFMKLRTDAVLPLTVAEVQKLLGPHVEGLKAEERHRPVRDWILRQRQDDLDTLG
LGLQGGIPNGYLVLDLSMQEALGSGRIFNAHYAGYFADLLIHDIETNPGPTPGTQSPFFL
LLLLTVLTVVTGSGHASSTPGGEKETSATQRSSVPSSTEKNAVSMTSSVLSSHSPGSG
SSTTQGQDVTLAPATEPASGSAATWGQDVTSVPVTRPALGSTTPPAHDVTSAPDNKP
APGSTAPPAHGVTSAPDTRPAPGSTAPPAHGVTSAPDTRPAPGSTAPPAHGVTSAPD
TRPAPGSTAPPAHGVTSAPDTRPAPGSTAPPAHGVTSAPDTRPALGSTAPPVHNVTSA
SGSASGSASTLVHNGTSARATTTPASKSTPFSIPSHHSDTPTTLASHSTKTDASSTHHS
SVPPLTSSNHSTSPQLSTGVSFFFLSFHISNLQFNSSLEDPSTDYYQELQRDISEMFLQI
YKQGGFLGLSNIKFRPGSVWQLTLAFREGTINVHDVETQFNQYKTEAASRYNLTISDV
SVSDVPFPFSAQSGAGVPGWGIALLVLVCVLVALAIVYLIALAVCQCRRKNYGQLDIFPA
RDTYHPMSEYPTYHTHGRYVPPSSTDRSPYEKVSAGNGGSSLSYTNPAVAAASANL
SEQ ID NO: 53-Plasmid 1322 ORF
atggctagcggagctgccccggagccggagaggacccccgttggccagggatcgtgggcccatccgggacgcacca
ggggaccatccgacaggggattctgtgtggtgtcaccggccaggccagcagaagaggcaaccagcctcgagggagc
gttgtctggaaccagacattcccacccgtcggtgggccggcagcaccacgcgggaccaccgtccacttccagaccgcca
cggccatgggacaccccttgcccgcctgtgtatgccgagactaaacacttcctgtactcatccggagacaaggaacagctt
cggccgtccttcctcctgtcgtcgctcagaccgagcctgaccggagcacgcagattggtggaaactatcttccttgggtcac
gtccgtggatgccaggtaccccacggcgcctcccgcgcctcccacagagatactggcagatgcggcctctgttcctggaa
ttgctgggaaaccacgctcagtgcccgtacggagtcctgctcaagactcactgccctctgagggcggcggtcactccggc
ggccggagtgtgcgcacgggagaagccccagggaagcgtggcagctccggaagaggaggacaccgatccgcgccg
cctcgtgcaacttctgcgccagcactcctcgccctggcaagtctacgggttcgtccgcgcctgcctgcgccgcctggtgccg
cctgggctctggggttcccggcataacgagcgccgcttcctgagaaatactaagaagtttatctcacttggaaaacatgcca
agttgtcgctgcaagaactcacgtggaagatgtcagtccgcgattgcgcctggctgcgccgctcgccgggcgtcgggtgtg
ttccagctgcagaacaccgcctgagagaagaaattctggccaaatttctgcattggctgatgtcagtgtacgtggtcgagct
gctgcgctcctttttctacgtcactgagactacctttcaaaagaaccgcctgttcttctaccgcaaatctgtgtggagcaagctg
cagtcaatcggcattcgccagcatctgaagagggtgcagctgcgggaactttccgaggcagaagtccgccagcaccgg
gaggcccggccggcgcttctcacgtcgcgtctgagattcatcccaaagcccgacgggctgaggcctatcgtcaacatgga
ttacgtcgtgggcgctcgcacctttcgccgtgaaaagcgggccgaacgcttgacctcacgggtgaaggccctcttctccgtg
ctgaactacgagagagcaagacggcctggcctgctgggagcttcggtgctgggactggacgatatccaccgggcttggc
ggacctttgttctccgggtgagagcccaagaccctccgccggaactgtacttcgtgaaggtggcgatcaccggagcctatg
atactattccgcaagatcgactcaccgaagtcatcgcctcgatcatcaaaccgcagaacacttactgcgtcaggcggtac
gccgtggtccagaaggccgcgcatggccacgtgagaaaggcgttcaagtcgcacgtgtccactctcaccgacctccagc
cttacatgaggcaattcgttgcgcatttgcaagagacttcgcccctgagagatgcggtggtcatcgagcagagctccagcct
gaacgaagcgagcagcggtctgtttgacgtgttcctccgcttcatgtgtcatcacgcggtgcgaatcaggggaaaatcata
cgtgcagtgccagggaatcccacaaggcagcattctgtcgactctcttgtgttccctttgctacggcgatatggaaaacaag
ctgttcgctgggatcagacgggacgggttgctgctcagactggtggacgacttcctgctggtgactccgcacctcactcacg
ccaaaacctttctccgcactctggtgaggggagtgccagaatacggctgtgtggtcaatctccggaaaactgtggtgaattt
ccctgtcgaggatgaggcactcggaggaaccgcatttgtccaaatgccagcacatggcctgttcccatggtgcggtctgct
gctggacacccgaactcttgaagtgcagtccgactactccagctatgcccggacgagcatccgcgccagcctcactttca
atcgcggctttaaggccggacgaaacatgcgcagaaagcttttcggagtcctccggcttaaatgccattcgctctttctcgat
ctccaagtcaattcgctgcagaccgtgtgcacgaacatctacaagatcctgctgctccaagcctaccggttccacgcttgcg
tgcttcagctgccgtttcaccaacaggtgtggaagaacccgaccttctttctgcgggtcattagcgatactgcctccctgtgtta
ctcaatcctcaaggcaaagaacgccggaatgtcgctgggtgcgaaaggagccgcgggacctcttcctagcgaagcggt
gcagtggctctgccaccaggctttcctcctgaagctgaccaggcacagagtgacctacgtcccgctgctgggctcgctgcg
cactgcacagacccagctgtctagaaaactccccggcaccaccctgaccgctctggaagccgccgccaacccagcatt
gccgtcagatttcaagaccatcttggacggatccggcacaatcctgtctgagggcgccaccaacttcagcctgctgaaact
ggccggcgacgtggaactgaaccctggccctacccctggaacccagagccccttcttccttctgctgctgctgaccgtgctg
actgtcgtgacaggctctggccacgccagctctacacctggcggcgagaaagagacaagcgccacccagagaagca
gcgtgccaagcagcaccgagaagaacgccgtgtccatgaccagctccgtgctgagcagccactctcctggcagcggca
gcagcacaacacagggccaggatgtgacactggcccctgccacagaacctgcctctggatctgccgccacctggggac
aggacgtgacaagcgtgccagtgaccagacctgccctgggctctacaacaccccctgcccacgatgtgaccagcgccc
ctgataacaagcctgcccctggaagcacagcccctccagctcatggcgtgacctctgccccagataccagaccagcccc
aggatctacagccccacccgcacacggcgtgacaagtgcccctgacacaagacccgctccaggctctactgctcctcct
gcccatggcgtgacaagcgctcccgatacaaggccagctcctggctccacagcaccaccagcacatggcgtgacatca
gctcccgacactagacctgctcccggatcaaccgctccaccagctcacggcgtgaccagcgcacctgataccagacctg
ctctgggaagcaccgcccctcccgtgcacaatgtgacatctgcttccggcagcgccagcggctctgcctctacactggtgc
acaacggcaccagcgccagagccacaacaaccccagccagcaagagcacccccttcagcatccctagccaccaca
gcgacacccctaccacactggccagccactccaccaagaccgatgcctctagcacccaccactccagcgtgccccctct
gaccagcagcaaccacagcacaagcccccagctgtctaccggcgtctcattcttctttctgtccttccacatcagcaacctg
cagttcaacagcagcctggaagatcccagcaccgactactaccaggaactgcagcgggatatcagcgagatgttcctgc
aaatctacaagcagggcggcttcctgggcctgagcaacatcaagttcagacccggcagcgtggtggtgcagctgaccct
ggctttccgggaaggcaccatcaacgtgcacgacgtggaaacccagttcaaccagtacaagaccgaggccgccagcc
ggtacaacctgaccatctccgatgtgtccgtgtccgacgtgcccttcccattctctgcccagtctggcgcaggcgtgccagg
atggggaattgctctgctggtgctcgtgtgcgtgctggtggccctggccatcgtgtatctgattgccctggccgtgtgccagtgc
cggcggaagaattacggccagctggacatcttccccgccagagacacctaccaccccatgagcgagtaccccacatac
cacacccacggcagatacgtgccacccagctccaccgacagatccccctacgagaaagtgtctgccggcaacggcgg
cagctccctgagctacacaaatcctgccgtggccgctgcctccgccaacctgggatccggcagaatcttcaacgcccact
acgccggctacttcgccgacctgctgatccacgacatcgagacaaaccctggccccctggctggcgagacaggacagg
aagccgctcctctggacggcgtgctggccaaccctcccaatatcagcagcctgagccccagacagctgctgggattccct
tgtgccgaggtgtccggcctgagcacagagagagtgcgggaactggctgtggccctggcccagaaaaacgtgaagctg
agcaccgagcagctgcggtgcctggcccacagactgtctgagcctcccgaggatctggacgccctgcctctggatctgct
gctgttcctgaaccccgacgccttcagcggacctcaggcctgcacccggttcttcagcagaatcaccaaggccaacgtgg
acctgctgcccagaggcgcccctgagagacagagactgctgcctgctgctctggcctgttggggagtgcggggctctctg
ctgtctgaagctgatgtgcgggccctgggaggcctggcttgtgatctgcctggaagattcgtggccgagagcgccgaagtg
ctgctgcctagactggtgtcctgtcccggccctctggaccaggatcagcaggaagctgccagagctgctctgcagggcgg
aggccctccttatggacctcctagcacttggagcgtgtccaccatggatgccctgaggggcctgctgccagtgctgggcca
gcctatcatcagatccatcccacagggcatcgtggccgcctggcggcagagaagctctagagatccctcttggcggcagc
ccgagcggacaatcctgcggcccaggtttcggagagaggtggaaaagaccgcctgcccctctggcaagaaggccaga
gagatcgacgagagcctgatcttctacaagaagtgggagctggaagcctgcgtggacgccgctctgctggccacccaga
tggacagagtgaacgccatccccttcacctatgagcagctggacgtgctgaagcacaagctggatgagctgtaccccca
gggctaccccgagagcgtgatccagcacctgggctacctgtttctgaagatgagccccgaggacatccggaagtggaac
gtgaccagcctggaaaccctgaaggccctgctggaagtgaacaagggccacgagatgtccccccaggtggccacact
gatcgacagattcgtgaagggcagaggccagctggacaaggacaccctggatacactgaccgccttctaccccggctat
ctgtgcagcctgtcccccgaggaactgagcagcgtgccacctagctctatctgggctgtgcggccccaggacctggatac
ctgcgatcctagacagctggatgtgctgtatcccaaggcccggctggccttccagaacatgaacggcagcgagtacttcgt
gaagatccagtccttcctgggcggagcccctaccgaggacctgaaagctctgagccagcagaacgtgtccatggatctg
gccacctttatgaagctgcggaccgacgccgtgctgcctctgacagtggctgaggtgcagaaactgctgggcccccatgt
ggaagggctgaaggccgaagaacggcacagacccgtgcgcgactggatcctgaggcagagacaggatgacctgga
cacactgggcctgggactgcaggggggcatccctaatggctacctggtgctggacctgagcatgcaggaagccctg
SEQ ID NO: 54-Plasmid 1322 Polypeptide
MASGAAPEPERTPVGQGSWAHPGRTRGPSDRGFCVVSPARPAEEATSLEGALSGTR
HSHPSVGRQHHAGPPSTSRPPRPWDTPCPPVYAETKHFLYSSGDKEQLRPSFLLSSL
RPSLTGARRLVETIFLGSRPWMPGTPRRLPRLPQRYWQMRPLFLELLGNHAQCPYGV
LLKTHCPLRAAVTPAAGVCAREKPQGSVAAPEEEDTDPRRLVQLLRQHSSPWQVYGF
VRACLRRLVPPGLWGSRHNERRFLRNTKKFISLGKHAKLSLQELTWKMSVRDCAWLR
RSPGVGCVPAAEHRLREEILAKFLHWLMSVYVVELLRSFFYVTETTFQKNRLFFYRKSV
WSKLQSIGIRQHLKRVQLRELSEAEVRQHREARPALLTSRLRFIPKPDGLRPIVNMDYV
VGARTFRREKRAERLTSRVKALFSVLNYERARRPGLLGASVLGLDDIHRAWRTFVLRV
RAQDPPPELYFVKVAITGAYDTIPQDRLTEVIASIIKPQNTYCVRRYAVVQKAAHGHVRK
AFKSHVSTLTDLQPYMRQFVAHLQETSPLRDAVVIEQSSSLNEASSGLFDVFLRFMCH
HAVRIRGKSYVQCQGIPQGSILSTLLCSLCYGDMENKLFAGIRRDGLLLRLVDDFLLVTP
HLTHAKTFLRTLVRGVPEYGCVVNLRKTVVNFPVEDEALGGTAFVQMPAHGLFPWCG
LLLDTRTLEVQSDYSSYARTSIRASLTFNRGFKAGRNMRRKLFGVLRLKCHSLFLDLQV
NSLQTVCTNIYKILLLQAYRFHACVLQLPFHQQVWKNPTFFLRVISDTASLCYSILKAKN
AGMSLGAKGAAGPLPSEAVQWLCHQAFLLKLTRHRVTYVPLLGSLRTAQTQLSRKLP
GTTLTALEAAANPALPSDFKTILDGSGTILSEGATNFSLLKLAGDVELNPGPTPGTQSPF
FLLLLLTVLTWTGSGHASSTPGGEKETSATQRSSVPSSTEKNAVSMTSSVLSSHSPG
SGSSTTQGQDVTLAPATEPASGSAATWGQDVTSVPVTRPALGSTTPPAHDVTSAPDN
KPAPGSTAPPAHGVTSAPDTRPAPGSTAPPAHGVTSAPDTRPAPGSTAPPAHGVTSA
PDTRPAPGSTAPPAHGVTSAPDTRPAPGSTAPPAHGVTSAPDTRPALGSTAPPVHNV
TSASGSASGSASTLVHNGTSARATTTPASKSTPFSIPSHHSDTPTTLASHSTKTDASST
HHSSVPPLTSSNHSTSPQLSTGVSFFFLSFHISNLQFNSSLEDPSTDYYQELQRDISEM
FLQIYKQGGFLGLSNIKFRPGSWVQLTLAFREGTINVHDVETQFNQYKTEAASRYNLTI
SDVSVSDVPFPFSAQSGAGVPGWGIALLVLVCVLVALAIVYLIALAVCQCRRKNYGQLD
IFPARDTYHPMSEYPTYHTHGRYVPPSSTDRSPYEKVSAGNGGSSLSYTNPAVAAASA
NLGSGRIFNAHYAGYFADLLIHDIETNPGPLAGETGQEAAPLDGVLANPPNISSLSPRQL
LGFPCAEVSGLSTERVRELAVALAQKNVKLSTEQLRCLAHRLSEPPEDLDALPLDLLLF
LNPDAFSGPQACTRFFSRITKANVDLLPRGAPERQRLLPAALACWGVRGSLLSEADVR
ALGGLACDLPGRFVAESAEVLLPRLVSCPGPLDQDQQEAARAALQGGGPPYGPPSTW
SVSTMDALRGLLPVLGQPIIRSIPQGIVAAWRQRSSRDPSWRQPERTILRPRFRREVEK
TACPSGKKARElDESLIFYKKWELEACVDAALLATQMDRVNAIPFTYEQLDVLKHKLDEL
YPQGYPESVIQHLGYLFLKMSPEDIRKWNVTSLETLKALLEVNKGHEMSPQVATLIDRF
VKGRGQLDKDTLDTLTAFYPGYLCSLSPEELSSVPPSSIWAVRPQDLDTCDPRQLDVL
YPKARLAFQNMNGSEYFVKIQSFLGGAPTEDLKALSQQNVSMDLATFMKLRTDAVLPL
TVAEVQKLLGPHVEGLKAEERHRPVRDWILRQRQDDLDTLGLGLQGGIPNGYLVLDLS
MQEAL
SEQ ID NO: 55-Plasmid 1351 ORF
atggctagcacccctggaacccagagccccttcttccttctgctgctgctgaccgtgctgactgtcgtgacaggctctggcca
cgccagctctacacctggcggcgagaaagagacaagcgccacccagagaagcagcgtgccaagcagcaccgaga
agaacgccgtgtccatgaccagctccgtgctgagcagccactctcctggcagcggcagcagcacaacacagggccag
gatgtgacactggcccctgccacagaacctgcctctggatctgccgccacctggggacaggacgtgacaagcgtgccag
tgaccagacctgccctgggctctacaacaccccctgcccacgatgtgaccagcgcccctgataacaagcctgcccctgg
aagcacagcccctccagctcatggcgtgacctctgccccagataccagaccagccccaggatctacagccccacccgc
acacggcgtgacaagtgcccctgacacaagacccgctccaggctctactgctcctcctgcccatggcgtgacaagcgctc
ccgatacaaggccagctcctggctccacagcaccaccagcacatggcgtgacatcagctcccgacactagacctgctcc
cggatcaaccgctccaccagctcacggcgtgaccagcgcacctgataccagacctgctctgggaagcaccgcccctcc
cgtgcacaatgtgacatctgcttccggcagcgccagcggctctgcctctacactggtgcacaacggcaccagcgccaga
gccacaacaaccccagccagcaagagcacccccttcagcatccctagccaccacagcgacacccctaccacactggc
cagccactccaccaagaccgatgcctctagcacccaccactccagcgtgccccctctgaccagcagcaaccacagcac
aagcccccagctgtctaccggcgtctcattcttctttctgtccttccacatcagcaacctgcagttcaacagcagcctggaag
atcccagcaccgactactaccaggaactgcagcgggatatcagcgagatgttcctgcaaatctacaagcagggcggctt
cctgggcctgagcaacatcaagttcagacccggcagcgtggtggtgcagctgaccctggctttccgggaaggcaccatc
aacgtgcacgacgtggaaacccagttcaaccagtacaagaccgaggccgccagccggtacaacctgaccatctccgat
gtgtccgtgtccgacgtgcccttcccattctctgcccagtctggcgcaggcgtgccaggatggggaattgctctgctggtgctc
gtgtgcgtgctggtggccctggccatcgtgtatctgattgccctggccgtgtgccagtgccggcggaagaattacggccagc
tggacatcttccccgccagagacacctaccaccccatgagcgagtaccccacataccacacccacggcagatacgtgc
cacccagctccaccgacagatccccctacgagaaagtgtctgccggcaacggcggcagctccctgagctacacaaatc
ctgccgtggccgctgcctccgccaacctgggatccggcagaatcttcaacgcccactacgccggctacttcgccgacctg
ctgatccacgacatcgagacaaaccctggccccctggctggcgagacaggacaggaagccgctcctctggacggcgtg
ctggccaaccctcccaatatcagcagcctgagccccagacagctgctgggattcccttgtgccgaggtgtccggcctgag
cacagagagagtgcgggaactggctgtggccctggcccagaaaaacgtgaagctgagcaccgagcagctgcggtgc
ctggcccacagactgtctgagcctcccgaggatctggacgccctgcctctggatctgctgctgttcctgaaccccgacgcctt
cagcggacctcaggcctgcacccggttcttcagcagaatcaccaaggccaacgtggacctgctgcccagaggcgcccc
tgagagacagagactgctgcctgctgctctggcctgttggggagtgcggggctctctgctgtctgaagctgatgtgcgggcc
ctgggaggcctggcttgtgatctgcctggaagattcgtggccgagagcgccgaagtgctgctgcctagactggtgtcctgtc
ccggccctctggaccaggatcagcaggaagctgccagagctgctctgcagggcggaggccctccttatggacctcctag
cacttggagcgtgtccaccatggatgccctgaggggcctgctgccagtgctgggccagcctatcatcagatccatcccaca
gggcatcgtggccgcctggcggcagagaagctctagagatccctcttggcggcagcccgagcggacaatcctgcggcc
caggtttcggagagaggtggaaaagaccgcctgcccctctggcaagaaggccagagagatcgacgagagcctgatctt
ctacaagaagtgggagctggaagcctgcgtggacgccgctctgctggccacccagatggacagagtgaacgccatccc
cttcacctatgagcagctggacgtgctgaagcacaagctggatgagctgtacccccagggctaccccgagagcgtgatc
cagcacctgggctacctgtttctgaagatgagccccgaggacatccggaagtggaacgtgaccagcctggaaaccctga
aggccctgctggaagtgaacaagggccacgagatgtccccccaggtggccacactgatcgacagattcgtgaagggca
gaggccagctggacaaggacaccctggatacactgaccgccttctaccccggctatctgtgcagcctgtcccccgagga
actgagcagcgtgccacctagctctatctgggctgtgcggccccaggacctggatacctgcgatcctagacagctggatgt
gctgtatcccaaggcccggctggccttccagaacatgaacggcagcgagtacttcgtgaagatccagtccttcctgggcg
gagcccctaccgaggacctgaaagctctgagccagcagaacgtgtccatggatctggccacctttatgaagctgcggac
cgacgccgtgctgcctctgacagtggctgaggtgcagaaactgctgggcccccatgtggaagggctgaaggccgaaga
acggcacagacccgtgcgcgactggatcctgaggcagagacaggatgacctggacacactgggcctgggactgcagg
ggggcatccctaatggctacctggtgctggacctgagcatgcaggaagccctgggatccggcgagggcagaggcagcc
tgctgacatgtggcgacgtggaagagaaccctggccccgccaaatttctgcattggctgatgtcagtgtacgtggtcgagct
gctgcgctcctttttctacgtcactgagactacctttcaaaagaaccgcctgttcttctaccgcaaatctgtgtggagcaagctg
cagtcaatcggcattcgccagcatctgaagagggtgcagctgcgggaactttccgaggcagaagtccgccagcaccgg
gaggcccggccggcgcttctcacgtcgcgtctgagattcatcccaaagcccgacgggctgaggcctatcgtcaacatgga
ttacgtcgtgggcgctcgcacctttcgccgtgaaaagcgggccgaacgcttgacctcacgggtgaaggccctcttctccgtg
ctgaactacgagagagcaagacggcctggcctgctgggagcttcggtgctgggactggacgatatccaccgggcttggc
ggacctttgttctccgggtgagagcccaagaccctccgccggaactgtacttcgtgaaggtggcgatcaccggagcctatg
atactattccgcaagatcgactcaccgaagtcatcgcctcgatcatcaaaccgcagaacacttactgcgtcaggcggtac
gccgtggtccagaaggccgcgcatggccacgtgagaaaggcgttcaagtcgcacgtgtccactctcaccgacctccagc
cttacatgaggcaattcgttgcgcatttgcaagagacttcgcccctgagagatgcggtggtcatcgagcagagctccagcct
gaacgaagcgagcagcggtctgtttgacgtgttcctccgcttcatgtgtcatcacgcggtgcgaatcaggggaaaatcata
cgtgcagtgccagggaatcccacaaggcagcattctgtcgactctcttgtgttccctttgctacggcgatatggaaaacaag
ctgttcgctgggatcagacgggacgggttgctgctcagactggtggacgacttcctgctggtgactccgcacctcactcacg
ccaaaacctttctccgcactctggtgaggggagtgccagaatacggctgtgtggtcaatctccggaaaactgtggtgaattt
ccctgtcgaggatgaggcactcggaggaaccgcatttgtccaaatgccagcacatggcctgttcccatggtgcggtctgct
gctggacacccgaactcttgaagtgcagtccgactactccagctatgcccggacgagcatccgcgccagcctcactttca
atcgcggctttaaggccggacgaaacatgcgcagaaagcttttcggagtcctccggcttaaatgccattcgctctttctcgat
ctccaagtcaattcgctgcagaccgtgtgcacgaacatctacaagatcctgctgctccaagcctaccggttccacgcttgcg
tgcttcagctgccgtttcaccaacaggtgtggaagaacccgaccttctttctgcgggtcattagcgatactgcctccctgtgtta
ctcaatcctcaaggcaaagaacgccggaatgtcgctgggtgcgaaaggagccgcgggacctcttcctagcgaagcggt
gcagtggctctgccaccaggctttcctcctgaagctgaccaggcacagagtgacctacgtcccgctgctgggctcgctgcg
cactgcacagacccagctgtctagaaaactccccggcaccaccctgaccgctctggaagccgccgccaacccagcatt
gccgtcagatttcaagaccatcttggac
SEQ ID NO: 56-Plasmid 1351 Polypeptide
MASTPGTQSPFFLLLLLTVLTVVTGSGHASSTPGGEKETSATQRSSVPSSTEKNAVSM
TSSVLSSHSPGSGSSTTQGQDVTLAPATEPASGSAATWGQDVTSVPVTRPALGSTTP
PAHDVTSAPDNKPAPGSTAPPAHGVTSAPDTRPAPGSTAPPAHGVTSAPDTRPAPGS
TAPPAHGVTSAPDTRPAPGSTAPPAHGVTSAPDTRPAPGSTAPPAHGVTSAPDTRPAL
GSTAPPVHNVTSASGSASGSASTLVHNGTSARATTTPASKSTPFSIPSHHSDTPTTLAS
HSTKTDASSTHHSSVPPLTSSNHSTSPQLSTGVSFFFLSFHISNLQFNSSLEDPSTDYY
QELQRDISEMFLQIYKQGGFLGLSNIKFRPGSVVVQLTLAFREGTINVHDVETQFNQYK
TEAASRYNLTISDVSVSDVPFPFSAQSGAGVPGWGIALLVLVCVLVALAIVYLIALAVCQ
CRRKNYGQLDIFPARDTYHPMSEYPTYHTHGRYVPPSSTDRSPYEKVSAGNGGSSLS
YTNPAVAAASANLGSGRIFNAHYAGYFADLLIHDIETNPGPLAGETGQEAAPLDGVLAN
PPNISSLSPRQLLGFPCAEVSGLSTERVRELAVALAQKNVKLSTEQLRCLAHRLSEPPE
DLDALPLDLLLFLNPDAFSGPQACTRFFSRITKANVDLLPRGAPERQRLLPAALACWGV
RGSLLSEADVRALGGLACDLPGRFVAESAEVLLPRLVSCPGPLDQDQQEAARAALQG
GGPPYGPPSTWSVSTMDALRGLLPVLGQPIIRSIPQGIVAAWRQRSSRDPSWRQPERT
ILRPRFRREVEKTACPSGKKAREIDESLIFYKKWELEACVDAALLATQMDRVNAIPFTYE
QLDVLKHKLDELYPQGYPESVIQHLGYLFLKMSPEDIRKWNVTSLETLKALLEVNKGHE
MSPQVATLIDRFVKGRGQLDKDTLDTLTAFYPGYLCSLSPEELSSVPPSSIWAVRPQDL
DTCDPRQLDVLYPKARLAFQNMNGSEYFVKIQSFLGGAPTEDLKALSQQNVSMDLATF
MKLRTDAVLPLTVAEVQKLLGPHVEGLKAEERHRPVRDWILRQRQDDLDTLGLGLQG
GIPNGYLVLDLSMQEALGSGEGRGSLLTCGDVEENPGPAKFLHWLMSVYVVELLRSFF
YVTETTFQKNRLFFYRKSVVVSKLQSIGIRQHLKRVQLRELSEAEVRQHREARPALLTSR
LRFIPKPDGLRPIVNMDYVVGARTFRREKRAERLTSRVKALFSVLNYERARRPGLLGAS
VLGLDDIHRAWRTFVLRVRAQDPPPELYFVKVAITGAYDTIPQDRLTEVIASIIKPQNTYC
VRRYAVVQKAAHGHVRKAFKSHVSTLTDLQPYMRQFVAHLQETSPLRDAVVIEQSSSL
NEASSGLFDVFLRFMCHHAVRIRGKSYVQCQGIPQGSILSTLLCSLCYGDMENKLFAGI
RRDGLLLRLVDDFLLVTPHLTHAKTFLRTLVRGVPEYGCVVNLRKTVVNFPVEDEALGG
TAFVQMPAHGLFPWCGLLLDTRTLEVQSDYSSYARTSIRASLTFNRGFKAGRNMRRKL
FGVLRLKCHSLFLDLQVNSLQTVCTNIYKILLLQAYRFHACVLQLPFHQQVWKNPTFFL
RVISDTASLCYSILKAKNAGMSLGAKGAAGPLPSEAVQWLCHQAFLLKLTRHRVTYVPL
LGSLRTAQTQLSRKLPGTTLTALEAAANPALPSDFKTILD
SEQ ID NO: 57-Plasmid 1352 ORF
atggctagcctggctggcgagacaggacaggaagccgctcctctggacggcgtgctggccaaccctcccaatatcagc
agcctgagccccagacagctgctgggattcccttgtgccgaggtgtccggcctgagcacagagagagtgcgggaactgg
ctgtggccctggcccagaaaaacgtgaagctgagcaccgagcagctgcggtgcctggcccacagactgtctgagcctcc
cgaggatctggacgccctgcctctggatctgctgctgttcctgaaccccgacgccttcagcggacctcaggcctgcacccg
gttcttcagcagaatcaccaaggccaacgtggacctgctgcccagaggcgcccctgagagacagagactgctgcctgct
gctctggcctgttggggagtgcggggctctctgctgtctgaagctgatgtgcgggccctgggaggcctggcttgtgatctgcc
tggaagattcgtggccgagagcgccgaagtgctgctgcctagactggtgtcctgtcccggccctctggaccaggatcagc
aggaagctgccagagctgctctgcagggcggaggccctccttatggacctcctagcacttggagcgtgtccaccatggat
gccctgaggggcctgctgccagtgctgggccagcctatcatcagatccatcccacagggcatcgtggccgcctggcggc
agagaagctctagagatccctcttggcggcagcccgagcggacaatcctgcggcccaggtttcggagagaggtggaaa
agaccgcctgcccctctggcaagaaggccagagagatcgacgagagcctgatcttctacaagaagtgggagctggaa
gcctgcgtggacgccgctctgctggccacccagatggacagagtgaacgccatccccttcacctatgagcagctggacgt
gctgaagcacaagctggatgagctgtacccccagggctaccccgagagcgtgatccagcacctgggctacctgtttctga
agatgagccccgaggacatccggaagtggaacgtgaccagcctggaaaccctgaaggccctgctggaagtgaacaa
gggccacgagatgtccccccaggtggccacactgatcgacagattcgtgaagggcagaggccagctggacaaggaca
ccctggatacactgaccgccttctaccccggctatctgtgcagcctgtcccccgaggaactgagcagcgtgccacctagct
ctatctgggctgtgcggccccaggacctggatacctgcgatcctagacagctggatgtgctgtatcccaaggcccggctgg
ccttccagaacatgaacggcagcgagtacttcgtgaagatccagtccttcctgggcggagcccctaccgaggacctgaa
agctctgagccagcagaacgtgtccatggatctggccacctttatgaagctgcggaccgacgccgtgctgcctctgacagt
ggctgaggtgcagaaactgctgggcccccatgtggaagggctgaaggccgaagaacggcacagacccgtgcgcgac
tggatcctgaggcagagacaggatgacctggacacactgggcctgggactgcaggggggcatccctaatggctacctg
gtgctggacctgagcatgcaggaagccctgggatccggcagaatcttcaacgcccactacgccggctacttcgccgacct
gctgatccacgacatcgagacaaaccctggccccacccctggaacccagagccccttcttccttctgctgctgctgaccgt
gctgactgtcgtgacaggctctggccacgccagctctacacctggcggcgagaaagagacaagcgccacccagagaa
gcagcgtgccaagcagcaccgagaagaacgccgtgtccatgaccagctccgtgctgagcagccactctcctggcagcg
gcagcagcacaacacagggccaggatgtgacactggcccctgccacagaacctgcctctggatctgccgccacctggg
gacaggacgtgacaagcgtgccagtgaccagacctgccctgggctctacaacaccccctgcccacgatgtgaccagcg
cccctgataacaagcctgcccctggaagcacagcccctccagctcatggcgtgacctctgccccagataccagaccagc
cccaggatctacagccccacccgcacacggcgtgacaagtgcccctgacacaagacccgctccaggctctactgctcct
cctgcccatggcgtgacaagcgctcccgatacaaggccagctcctggctccacagcaccaccagcacatggcgtgaca
tcagctcccgacactagacctgctcccggatcaaccgctccaccagctcacggcgtgaccagcgcacctgataccagac
ctgctctgggaagcaccgcccctcccgtgcacaatgtgacatctgcttccggcagcgccagcggctctgcctctacactggt
gcacaacggcaccagcgccagagccacaacaaccccagccagcaagagcacccccttcagcatccctagccacca
cagcgacacccctaccacactggccagccactccaccaagaccgatgcctctagcacccaccactccagcgtgccccc
tctgaccagcagcaaccacagcacaagcccccagctgtctaccggcgtctcattcttctttctgtccttccacatcagcaacc
tgcagttcaacagcagcctggaagatcccagcaccgactactaccaggaactgcagcgggatatcagcgagatgttcct
gcaaatctacaagcagggcggcttcctgggcctgagcaacatcaagttcagacccggcagcgtggtggtgcagctgacc
ctggctttccgggaaggcaccatcaacgtgcacgacgtggaaacccagttcaaccagtacaagaccgaggccgccag
ccggtacaacctgaccatctccgatgtgtccgtgtccgacgtgcccttcccattctctgcccagtctggcgcaggcgtgccag
gatggggaattgctctgctggtgctcgtgtgcgtgctggtggccctggccatcgtgtatctgattgccctggccgtgtgccagt
gccggcggaagaattacggccagctggacatcttccccgccagagacacctaccaccccatgagcgagtaccccacat
accacacccacggcagatacgtgccacccagctccaccgacagatccccctacgagaaagtgtctgccggcaacggc
ggcagctccctgagctacacaaatcctgccgtggccgctgcctccgccaacctgggatccggcacaatcctgtctgaggg
cgccaccaacttcagcctgctgaaactggccggcgacgtggaactgaaccctggccctgccaaatttctgcattggctgat
gtcagtgtacgtggtcgagctgctgcgctcctttttctacgtcactgagactacctttcaaaagaaccgcctgttcttctaccgc
aaatctgtgtggagcaagctgcagtcaatcggcattcgccagcatctgaagagggtgcagctgcgggaactttccgaggc
agaagtccgccagcaccgggaggcccggccggcgcttctcacgtcgcgtctgagattcatcccaaagcccgacgggct
gaggcctatcgtcaacatggattacgtcgtgggcgctcgcacctttcgccgtgaaaagcgggccgaacgcttgacctcac
gggtgaaggccctcttctccgtgctgaactacgagagagcaagacggcctggcctgctgggagcttcggtgctgggactg
gacgatatccaccgggcttggcggacctttgttctccgggtgagagcccaagaccctccgccggaactgtacttcgtgaag
gtggcgatcaccggagcctatgatactattccgcaagatcgactcaccgaagtcatcgcctcgatcatcaaaccgcagaa
cacttactgcgtcaggcggtacgccgtggtccagaaggccgcgcatggccacgtgagaaaggcgttcaagtcgcacgtg
tccactctcaccgacctccagccttacatgaggcaattcgttgcgcatttgcaagagacttcgcccctgagagatgcggtgg
tcatcgagcagagctccagcctgaacgaagcgagcagcggtctgtttgacgtgttcctccgcttcatgtgtcatcacgcggt
gcgaatcaggggaaaatcatacgtgcagtgccagggaatcccacaaggcagcattctgtcgactctcttgtgttccctttgct
acggcgatatggaaaacaagctgttcgctgggatcagacgggacgggttgctgctcagactggtggacgacttcctgctg
gtgactccgcacctcactcacgccaaaacctttctccgcactctggtgaggggagtgccagaatacggctgtgtggtcaat
ctccggaaaactgtggtgaatttccctgtcgaggatgaggcactcggaggaaccgcatttgtccaaatgccagcacatgg
cctgttcccatggtgcggtctgctgctggacacccgaactcttgaagtgcagtccgactactccagctatgcccggacgagc
atccgcgccagcctcactttcaatcgcggctttaaggccggacgaaacatgcgcagaaagcttttcggagtcctccggctt
aaatgccattcgctctttctcgatctccaagtcaattcgctgcagaccgtgtgcacgaacatctacaagatcctgctgctccaa
gcctaccggttccacgcttgcgtgcttcagctgccgtttcaccaacaggtgtggaagaacccgaccttctttctgcgggtcatt
agcgatactgcctccctgtgttactcaatcctcaaggcaaagaacgccggaatgtcgctgggtgcgaaaggagccgcgg
gacctcttcctagcgaagcggtgcagtggctctgccaccaggctttcctcctgaagctgaccaggcacagagtgacctacg
tcccgctgctgggctcgctgcgcactgcacagacccagctgtctagaaaactccccggcaccaccctgaccgctctggaa
gccgccgccaacccagcattgccgtcagatttcaagaccatcttggac
SEQ ID NO: 58-Plasmid 1352 Polypeptide
MASLAGETGQEAAPLDGVLANPPNISSLSPRQLLGFPCAEVSGLSTERVRELAVALAQ
KNVKLSTEQLRCLAHRLSEPPEDLDALPLDLLLFLNPDAFSGPQACTRFFSRITKANVDL
LPRGAPERQRLLPAALACWGVRGSLLSEADVRALGGLACDLPGRFVAESAEVLLPRLV
SCPGPLDQDQQEAARAALQGGGPPYGPPSTWSVSTMDALRGLLPVLGQPIIRSIPQGI
VAAWRQRSSRDPSWRQPERTILRPRFRREVEKTACPSGKKAREIDESLIFYKKWELEA
CVDAALLATQMDRVNAIPFTYEQLDVLKHKLDELYPQGYPESVIQHLGYLFLKMSPEDI
RKWNVTSLETLKALLEVNKGHEMSPQVATLIDRFVKGRGQLDKDTLDTLTAFYPGYLC
SLSPEELSSVPPSSIWAVRPQDLDTCDPRQLDVLYPKARLAFQNMNGSEYFVKIQSFL
GGAPTEDLKALSQQNVSMDLATFMKLRTDAVLPLTVAEVQKLLGPHVEGLKAEERHRP
VRDWILRQRQDDLDTLGLGLQGGIPNGYLVLDLSMQEALGSGRIFNAHYAGYFADLLIH
DIETNPGPTPGTQSPFFLLLLLTVLTWTGSGHASSTPGGEKETSATQRSSVPSSTEKN
AVSMTSSVLSSHSPGSGSSTTQGQDVTLAPATEPASGSAATWGQDVTSVPVTRPALG
STTPPAHDVTSAPDNKPAPGSTAPPAHGVTSAPDTRPAPGSTAPPAHGVTSAPDTRP
APGSTAPPAHGVTSAPDTRPAPGSTAPPAHGVTSAPDTRPAPGSTAPPAHGVTSAPD
TRPALGSTAPPVHNVTSASGSASGSASTLVHNGTSARATTTPASKSTPFSIFSHHSDTP
TTLASHSTKTDASSTHHSSVPPLTSSNHSTSPQLSTGVSFFFLSFHISNLQFNSSLEDPS
TDYYQELQRDISEMFLQIYKQGGFLGLSNIKFRPGSVVVQLTLAFREGTINVHDVETQF
NQYKTEAASRYNLTISDVSVSDVPFPFSAQSGAGVPGWGIALLVLVCVLVALAIVYLIAL
AVCQCRRKNYGQLDIFPARDTYHPMSEYPTYHTHGRYVPPSSTDRSPYEKVSAGNGG
SSLSYTNPAVAAASANLGSGTILSEGATNFSLLKLAGDVELNPGPAKFLHWLMSVYVVE
LLRSFFYVTETTFQKNRLFFYRKSVWSKLQSIGIRQHLKRVQLRELSEAEVRQHREARP
ALLTSRLRFIPKPDGLRPIVNMDYVVGARTFRREKRAERLTSRVKALFSVLNYERARRP
GLLGASVLGLDDIHRAWRTFVLRVRAQDPPPELYFVKVAITGAYDTIPQDRLTEVIASI1K
PQNTYCVRRYAVVQKAAHGHVRKAFKSHVSTLTDLQPYMRQFVAHLQETSPLRDAVVI
EQSSSLNEASSGLFDVFLRFMCHHAVRIRGKSYVQCQGIPQGSILSTLLCSLCYGDME
NKLFAGIRRDGLLLRLVDDFLLVTPHLTHAKTFLRTLVRGVPEYGCVVNLRKTWNFFV
EDEALGGTAFVQMPANGLFPWCGLLLDTRTLEVQSDYSSYARTSIRASLTFNRGFKAG
RNMRRKLFGVLRLKCHSLFLDLQVNSLQTVCTNIYKILLLQAYRFHACVLQLPFHQQVW
KNPTFFLRVISDTASLCYSILKAKNAGMSLGAKGAAGPLPSEAVQWLCHQAFLLKLTRH
RVTYVPLLGSLRTAQTQLSRKLPGTTLTALEAAANPALPSDFKTILD
SEQ ID NO: 59-Plasmid 1353 ORF
atggctagcctggctggcgagacaggacaggaagccgctcctctggacggcgtgctggccaaccctcccaatatcagc
agcctgagccccagacagctgctgggattcccttgtgccgaggtgtccggcctgagcacagagagagtgcgggaactgg
ctgtggccctggcccagaaaaacgtgaagctgagcaccgagcagctgcggtgcctggcccacagactgtctgagcctcc
cgaggatctggacgccctgcctctggatctgctgctgttcctgaaccccgacgccttcagcggacctcaggcctgcacccg
gttcttcagcagaatcaccaaggccaacgtggacctgctgcccagaggcgcccctgagagacagagactgctgcctgct
gctctggcctgttggggagtgcggggctctctgctgtctgaagctgatgtgcgggccctgggaggcctggcttgtgatctgcc
tggaagattcgtggccgagagcgccgaagtgctgctgcctagactggtgtcctgtcccggccctctggaccaggatcagc
aggaagctgccagagctgctctgcagggcggaggccctccttatggacctcctagcacttggagcgtgtccaccatggat
gccctgaggggcctgctgccagtgctgggccagcctatcatcagatccatcccacagggcatcgtggccgcctggcggc
agagaagctctagagatccctcttggcggcagcccgagcggacaatcctgcggcccaggtttcggagagaggtggaaa
agaccgcctgcccctctggcaagaaggccagagagatcgacgagagcctgatcttctacaagaagtgggagctggaa
gcctgcgtggacgccgctctgctggccacccagatggacagagtgaacgccatccccttcacctatgagcagctggacgt
gctgaagcacaagctggatgagctgtacccccagggctaccccgagagcgtgatccagcacctgggctacctgtttctga
agatgagccccgaggacatccggaagtggaacgtgaccagcctggaaaccctgaaggccctgctggaagtgaacaa
gggccacgagatgtccccccaggtggccacactgatcgacagattcgtgaagggcagaggccagctggacaaggaca
ccctggatacactgaccgccttctaccccggctatctgtgcagcctgtcccccgaggaactgagcagcgtgccacctagct
ctatctgggctgtgcggccccaggacctggatacctgcgatcctagacagctggatgtgctgtatcccaaggcccggctgg
ccttccagaacatgaacggcagcgagtacttcgtgaagatccagtccttcctgggcggagcccctaccgaggacctgaa
agctctgagccagcagaacgtgtccatggatctggccacctttatgaagctgcggaccgacgccgtgctgcctctgacagt
ggctgaggtgcagaaactgctgggcccccatgtggaagggctgaaggccgaagaacggcacagacccgtgcgcgac
tggatcctgaggcagagacaggatgacctggacacactgggcctgggactgcaggggggcatccctaatggctacctg
gtgctggacctgagcatgcaggaagccctgggatccggcgagggcagaggcagcctgctgacatgtggcgacgtgga
agagaaccctggccccgccaaatttctgcattggctgatgtcagtgtacgtggtcgagctgctgcgctcctttttctacgtcact
gagactacctttcaaaagaaccgcctgttcttctaccgcaaatctgtgtggagcaagctgcagtcaatcggcattcgccagc
atctgaagagggtgcagctgcgggaactttccgaggcagaagtccgccagcaccgggaggcccggccggcgcttctca
cgtcgcgtctgagattcatcccaaagcccgacgggctgaggcctatcgtcaacatggattacgtcgtgggcgctcgcacct
ttcgccgtgaaaagcgggccgaacgcttgacctcacgggtgaaggccctcttctccgtgctgaactacgagagagcaag
acggcctggcctgctgggagcttcggtgctgggactggacgatatccaccgggcttggcggacctttgttctccgggtgaga
gcccaagaccctccgccggaactgtacttcgtgaaggtggcgatcaccggagcctatgatactattccgcaagatcgact
caccgaagtcatcgcctcgatcatcaaaccgcagaacacttactgcgtcaggcggtacgccgtggtccagaaggccgcg
catggccacgtgagaaaggcgttcaagtcgcacgtgtccactctcaccgacctccagccttacatgaggcaattcgttgcg
catttgcaagagacttcgcccctgagagatgcggtggtcatcgagcagagctccagcctgaacgaagcgagcagcggtc
tgtttgacgtgttcctccgcttcatgtgtcatcacgcggtgcgaatcaggggaaaatcatacgtgcagtgccagggaatccc
acaaggcagcattctgtcgactctcttgtgttccctttgctacggcgatatggaaaacaagctgttcgctgggatcagacggg
acgggttgctgctcagactggtggacgacttcctgctggtgactccgcacctcactcacgccaaaacctttctccgcactctg
gtgaggggagtgccagaatacggctgtgtggtcaatctccggaaaactgtggtgaatttccctgtcgaggatgaggcactc
ggaggaaccgcatttgtccaaatgccagcacatggcctgttcccatggtgcggtctgctgctggacacccgaactcttgaa
gtgcagtccgactactccagctatgcccggacgagcatccgcgccagcctcactttcaatcgcggctttaaggccggacg
aaacatgcgcagaaagcttttcggagtcctccggcttaaatgccattcgctctttctcgatctccaagtcaattcgctgcagac
cgtgtgcacgaacatctacaagatcctgctgctccaagcctaccggttccacgcttgcgtgcttcagctgccgtttcaccaac
aggtgtggaagaacccgaccttctttctgcgggtcattagcgatactgcctccctgtgttactcaatcctcaaggcaaagaac
gccggaatgtcgctgggtgcgaaaggagccgcgggacctcttcctagcgaagcggtgcagtggctctgccaccaggcttt
cctcctgaagctgaccaggcacagagtgacctacgtcccgctgctgggctcgctgcgcactgcacagacccagctgtcta
gaaaactccccggcaccaccctgaccgctctggaagccgccgccaacccagcattgccgtcagatttcaagaccatcttg
gacggatccggcacaatcctgtctgagggcgccaccaacttcagcctgctgaaactggccggcgacgtggaactgaac
cctggccctacccctggaacccagagccccttcttccttctgctgctgctgaccgtgctgactgtcgtgacaggctctggcca
cgccagctctacacctggcggcgagaaagagacaagcgccacccagagaagcagcgtgccaagcagcaccgaga
agaacgccgtgtccatgaccagctccgtgctgagcagccactctcctggcagcggcagcagcacaacacagggccag
gatgtgacactggcccctgccacagaacctgcctctggatctgccgccacctggggacaggacgtgacaagcgtgccag
tgaccagacctgccctgggctctacaacaccccctgcccacgatgtgaccagcgcccctgataacaagcctgcccctgg
aagcacagcccctccagctcatggcgtgacctctgccccagataccagaccagccccaggatctacagccccacccgc
acacggcgtgacaagtgcccctgacacaagacccgctccaggctctactgctcctcctgcccatggcgtgacaagcgctc
ccgatacaaggccagctcctggctccacagcaccaccagcacatggcgtgacatcagctcccgacactagacctgctcc
cggatcaaccgctccaccagctcacggcgtgaccagcgcacctgataccagacctgctctgggaagcaccgcccctcc
cgtgcacaatgtgacatctgcttccggcagcgccagcggctctgcctctacactggtgcacaacggcaccagcgccaga
gccacaacaaccccagccagcaagagcacccccttcagcatccctagccaccacagcgacacccctaccacactggc
cagccactccaccaagaccgatgcctctagcacccaccactccagcgtgccccctctgaccagcagcaaccacagcac
aagcccccagctgtctaccggcgtctcattcttctttctgtccttccacatcagcaacctgcagttcaacagcagcctggaag
atcccagcaccgactactaccaggaactgcagcgggatatcagcgagatgttcctgcaaatctacaagcagggcggctt
cctgggcctgagcaacatcaagttcagacccggcagcgtggtggtgcagctgaccctggctttccgggaaggcaccatc
aacgtgcacgacgtggaaacccagttcaaccagtacaagaccgaggccgccagccggtacaacctgaccatctccgat
gtgtccgtgtccgacgtgcccttcccattctctgcccagtctggcgcaggcgtgccaggatggggaattgctctgctggtgctc
gtgtgcgtgctggtggccctggccatcgtgtatctgattgccctggccgtgtgccagtgccggcggaagaattacggccagc
tggacatcttccccgccagagacacctaccaccccatgagcgagtaccccacataccacacccacggcagatacgtgc
cacccagctccaccgacagatccccctacgagaaagtgtctgccggcaacggcggcagctccctgagctacacaaatc
ctgccgtggccgctgcctccgccaacctg
SEQ ID NO: 60-Plasmid 1353 Polypeptide
MASLAGETGQEAAPLDGVLANPPNISSLSPRQLLGFPCAEVSGLSTERVRELAVALAQ
KNVKLSTEQLRCLAHRLSEPPEDLDALPLDLLLFLNPDAFSGPQACTRFFSRITKANVDL
LPRGAPERQRLLPAALACWGVRGSLLSEADVRALGGLACDLPGRFVAESAEVLLPRLV
SCPGPLDQDQQEAARAALQGGGPPYGPPSTWSVSTMDALRGLLPVLGQPIIRSIPQGI
VAAWRQRSSRDPSWRQPERTILRPRFRREVEKTACPSGKKAREIDESLIFYKKWELEA
CVDAALLATQMDRVNAIPFTYEQLDVLKHKLDELYPQGYPESVIQHLGYLFLKMSPEDI
RKWNVTSLETLKALLEVNKGHEMSPQVATLIDRFVKGRGQLDKDTLDTLTAFYPGYLC
SLSPEELSSVPPSSIWAVRPQDLDTCDPRQLDVLYPKARLAFQNMNGSEYFVKIQSFL
GGAPTEDLKALSQQNVSMDLATFMKLRTDAVLPLTVAEVQKLLGPHVEGLKAEERHRP
VRDWILRQRQDDLDTLGLGLQGGIPNGYLVLDLSMQEALGSGEGRGSLLTCGDVEEN
PGPAKFLHWLMSVYVVELLRSFFYVTETTFQKNRLFFYRKSVWSKLQSIGIRQHLKRVQ
LRELSEAEVRQHREARPALLTSRLRFIPKPDGLRPIVNMDYVVGARTFRREKRAERLTS
RVKALFSVLNYERARRPGLLGASVLGLDDIHRAWRTFVLRVRAQDPPPELYFVKVAITG
AYDTIPQDRLTEVIASIIKPQNTYCVRRYAVVQKAAHGHVRKAFKSHVSTLTDLQPYMR
QFVAHLQETSPLRDAVVIEQSSSLNEASSGLFDVFLRFMCHHAVRIRGKSYVQCQGIP
QGSILSTLLCSLCYGDMENKLFAGIRRDGLLLRLVDDFLLVTPHLTHAKTFLRTLVRGVP
EYGCVVNLRKTWNFPVEDEALGGTAFVQMPANGLFPWCGLLLDTRTLEVQSDYSSY
ARTSIRASLTFNRGFKAGRNMRRKLFGVLRLKCHSLFLDLQVNSLQTVCTNIYKILLLQA
YRFHACVLQLPFHQQVWKNPTFFLRVISDTASLCYSILKAKNAGMSLGAKGAAGPLPS
EAVQWLCHQAFLLKLTRHRVTYVPLLGSLRTAQTQLSRKLPGTTLTALEAAANPALPSD
FKTILDGSGTILSEGATNFSLLKLAGDVELNPGPTPGTQSPFFLLLLLTVLTVVTGSGHA
SSTPGGEKETSATQRSSVPSSTEKNAVSMTSSVLSSHSPGSGSSTTQGQDVTLAPAT
EPASGSAATWGQDVTSVPVTRPALGSTTPPAHDVTSAPDNKPAPGSTAPPAHGVTSA
PDTRPAPGSTAPPAHGVTSAPDTRPAPGSTAPPAHGVTSAPDTRPAPGSTAPPAHGV
TSAPDTRPAPGSTAPPAHGVTSAPDTRPALGSTAPPVHNVTSASGSASGSASTLVHN
GTSARATTTPASKSTPFSIPSHHSDTPTTLASHSTKTDASSTHHSSVPPLTSSNHSTSP
QLSTGVSFFFLSFHISNLQFNSSLEDPSTDYYQELQRDISEMFLQIYKQGGFLGLSNIKF
RPGSVVVQLTLAFREGTINVHDVETQFNQYKTEAASRYNLTISDVSVSDVPFPFSAQSG
AGVPGWGIALLVLVCVLVALAIVYLIALAVCQCRRKNYGQLDIFPARDTYHPMSEYPTY
HTHGRYVPPSSTDRSPYEKVSAGNGGSSLSYTNPAVAAASANL
SEQ ID NO: 61-Plasmid 1354 ORF
atggctagcacccctggaacccagagccccttcttccttctgctgctgctgaccgtgctgactgtcgtgacaggctctggcca
cgccagctctacacctggcggcgagaaagagacaagcgccacccagagaagcagcgtgccaagcagcaccgaga
agaacgccgtgtccatgaccagctccgtgctgagcagccactctcctggcagcggcagcagcacaacacagggccag
gatgtgacactggcccctgccacagaacctgcctctggatctgccgccacctggggacaggacgtgacaagcgtgccag
tgaccagacctgccctgggctctacaacaccccctgcccacgatgtgaccagcgcccctgataacaagcctgcccctgg
aagcacagcccctccagctcatggcgtgacctctgccccagataccagaccagccccaggatctacagccccacccgc
acacggcgtgacaagtgcccctgacacaagacccgctccaggctctactgctcctcctgcccatggcgtgacaagcgctc
ccgatacaaggccagctcctggctccacagcaccaccagcacatggcgtgacatcagctcccgacactagacctgctcc
cggatcaaccgctccaccagctcacggcgtgaccagcgcacctgataccagacctgctctgggaagcaccgcccctcc
cgtgcacaatgtgacatctgcttccggcagcgccagcggctctgcctctacactggtgcacaacggcaccagcgccaga
gccacaacaaccccagccagcaagagcacccccttcagcatccctagccaccacagcgacacccctaccacactggc
cagccactccaccaagaccgatgcctctagcacccaccactccagcgtgccccctctgaccagcagcaaccacagcac
aagcccccagctgtctaccggcgtctcattcttctttctgtccttccacatcagcaacctgcagttcaacagcagcctggaag
atcccagcaccgactactaccaggaactgcagcgggatatcagcgagatgttcctgcaaatctacaagcagggcggctt
cctgggcctgagcaacatcaagttcagacccggcagcgtggtggtgcagctgaccctggctttccgggaaggcaccatc
aacgtgcacgacgtggaaacccagttcaaccagtacaagaccgaggccgccagccggtacaacctgaccatctccgat
gtgtccgtgtccgacgtgcccttcccattctctgcccagtctggcgcaggcgtgccaggatggggaattgctctgctggtgctc
gtgtgcgtgctggtggccctggccatcgtgtatctgattgccctggccgtgtgccagtgccggcggaagaattacggccagc
tggacatcttccccgccagagacacctaccaccccatgagcgagtaccccacataccacacccacggcagatacgtgc
cacccagctccaccgacagatccccctacgagaaagtgtctgccggcaacggcggcagctccctgagctacacaaatc
ctgccgtggccgctgcctccgccaacctgggatccggcagaatcttcaacgcccactacgccggctacttcgccgacctg
ctgatccacgacatcgagacaaaccctggccccctggctggcgagacaggacaggaagccgctcctctggacggcgtg
ctggccaaccctcccaatatcagcagcctgagccccagacagctgctgggattcccttgtgccgaggtgtccggcctgag
cacagagagagtgcgggaactggctgtggccctggcccagaaaaacgtgaagctgagcaccgagcagctgcggtgc
ctggcccacagactgtctgagcctcccgaggatctggacgccctgcctctggatctgctgctgttcctgaaccccgacgcctt
cagcggacctcaggcctgcacccggttcttcagcagaatcaccaaggccaacgtggacctgctgcccagaggcgcccc
tgagagacagagactgctgcctgctgctctggcctgttggggagtgcggggctctctgctgtctgaagctgatgtgcgggcc
ctgggaggcctggcttgtgatctgcctggaagattcgtggccgagagcgccgaagtgctgctgcctagactggtgtcctgtc
ccggccctctggaccaggatcagcaggaagctgccagagctgctctgcagggcggaggccctccttatggacctcctag
cacttggagcgtgtccaccatggatgccctgaggggcctgctgccagtgctgggccagcctatcatcagatccatcccaca
gggcatcgtggccgcctggcggcagagaagctctagagatccctcttggcggcagcccgagcggacaatcctgcggcc
caggtttcggagagaggtggaaaagaccgcctgcccctctggcaagaaggccagagagatcgacgagagcctgatctt
ctacaagaagtgggagctggaagcctgcgtggacgccgctctgctggccacccagatggacagagtgaacgccatccc
cttcacctatgagcagctggacgtgctgaagcacaagctggatgagctgtacccccagggctaccccgagagcgtgatc
cagcacctgggctacctgtttctgaagatgagccccgaggacatccggaagtggaacgtgaccagcctggaaaccctga
aggccctgctggaagtgaacaagggccacgagatgtccccccaggtggccacactgatcgacagattcgtgaagggca
gaggccagctggacaaggacaccctggatacactgaccgccttctaccccggctatctgtgcagcctgtcccccgagga
actgagcagcgtgccacctagctctatctgggctgtgcggccccaggacctggatacctgcgatcctagacagctggatgt
gctgtatcccaaggcccggctggccttccagaacatgaacggcagcgagtacttcgtgaagatccagtccttcctgggcg
gagcccctaccgaggacctgaaagctctgagccagcagaacgtgtccatggatctggccacctttatgaagctgcggac
cgacgccgtgctgcctctgacagtggctgaggtgcagaaactgctgggcccccatgtggaagggctgaaggccgaaga
acggcacagacccgtgcgcgactggatcctgaggcagagacaggatgacctggacacactgggcctgggactgcagg
ggggcatccctaatggctacctggtgctggacctgagcatgcaggaagccctgggatccggcgagggcagaggcagcc
tgctgacatgtggcgacgtggaagagaaccctggccccagcttcctcctgtcgtcgctcagaccgagcctgaccggagca
cgcagattggtggaaactatcttccttgggtcacgtccgtggatgccaggtaccccacggcgcctcccgcgcctcccacag
agatactggcagatgcggcctctgttcctggaattgctgggaaaccacgctcagtgcccgtacggagtcctgctcaagact
cactgccctctgagggcggcggtcactccggcggccggagtgtgcgcacgggagaagccccagggaagcgtggcag
ctccggaagaggaggacaccgatccgcgccgcctcgtgcaacttctgcgccagcactcctcgccctggcaagtctacgg
gttcgtccgcgcctgcctgcgccgcctggtgccgcctgggctctggggttcccggcataacgagcgccgcttcctgagaaa
tactaagaagtttatctcacttggaaaacatgccaagttgtcgctgcaagaactcacgtggaagatgtcagtccgcgattgc
gcctggctgcgccgctcgccgggcgtcgggtgtgttccagctgcagaacaccgcctgagagaagaaattctggccaaatt
tctgcattggctgatgtcagtgtacgtggtcgagctgctgcgctcctttttctacgtcactgagactacctttcaaaagaaccgc
ctgttcttctaccgcaaatctgtgtggagcaagctgcagtcaatcggcattcgccagcatctgaagagggtgcagctgcgg
gaactttccgaggcagaagtccgccagcaccgggaggcccggccggcgcttctcacgtcgcgtctgagattcatcccaa
agcccgacgggctgaggcctatcgtcaacatggattacgtcgtgggcgctcgcacctttcgccgtgaaaagcgggccga
acgcttgacctcacgggtgaaggccctcttctccgtgctgaactacgagagagcaagacggcctggcctgctgggagctt
cggtgctgggactggacgatatccaccgggcttggcggacctttgttctccgggtgagagcccaagaccctccgccggaa
ctgtacttcgtgaaggtggcgatcaccggagcctatgatactattccgcaagatcgactcaccgaagtcatcgcctcgatca
tcaaaccgcagaacacttactgcgtcaggcggtacgccgtggtccagaaggccgcgcatggccacgtgagaaaggcgt
tcaagtcgcacgtgtccactctcaccgacctccagccttacatgaggcaattcgttgcgcatttgcaagagacttcgcccctg
agagatgcggtggtcatcgagcagagctccagcctgaacgaagcgagcagcggtctgtttgacgtgttcctccgcttcatg
tgtcatcacgcggtgcgaatcaggggaaaatcatacgtgcagtgccagggaatcccacaaggcagcattctgtcgactct
cttgtgttccctttgctacggcgatatggaaaacaagctgttcgctgggatcagacgggacgggttgctgctcagactggtgg
acgacttcctgctggtgactccgcacctcactcacgccaaaacctttctccgcactctggtgaggggagtgccagaatacg
gctgtgtggtcaatctccggaaaactgtggtgaatttccctgtcgaggatgaggcactcggaggaaccgcatttgtccaaat
gccagcacatggcctgttcccatggtgcggtctgctgctggacacccgaactcttgaagtgcagtccgactactccagctat
gcccggacgagcatccgcgccagcctcactttcaatcgcggctttaaggccggacgaaacatgcgcagaaagcttttcg
gagtcctccggcttaaatgccattcgctctttctcgatctccaagtcaattcgctgcagaccgtgtgcacgaacatctacaag
atcctgctgctccaagcctaccggttccacgcttgcgtgcttcagctgccgtttcaccaacaggtgtggaagaacccgacctt
ctttctgcgggtcattagcgatactgcctccctgtgttactcaatcctcaaggcaaagaacgccggaatgtcgctgggtgcga
aaggagccgcgggacctcttcctagcgaagcggtgcagtggctctgccaccaggctttcctcctgaagctgaccaggcac
agagtgacctacgtcccgctgctgggctcgctgcgcactgcacagacccagctgtctagaaaactccccggcaccaccct
gaccgctctggaagccgccgccaacccagcattgccgtcagatttcaagaccatcttggac
SEQ ID NO: 62-Plasmid 1354 Polypeptide
MASTPGTQSPFFLLLLLTVLTVVTGSGHASSTPGGEKETSATQRSSVPSSTEKNAVSM
TSSVLSSHSPGSGSSTTQGQDVTLAPATEPASGSAATWGQDVTSVPVTRPALGSTTP
PAHDVTSAPDNKPAPGSTAPPAHGVTSAPDTRPAPGSTAPPAHGVTSAPDTRPAPGS
TAPPAHGVTSAPDTRPAPGSTAPPAHGVTSAPDTRPAPGSTAPPAHGVTSAPDTRPAL
GSTAPPVHNVTSASGSASGSASTLVHNGTSARATTTPASKSTPFSIPSHHSDTPTTLAS
HSTKTDASSTHHSSVPPLTSSNHSTSPQLSTGVSFFFLSFHISNLQFNSSLEDPSTDYY
QELQRDISEMFLQIYKQGGFLGLSNIKFRPGSVVVQLTLAFREGTINVHDVETQFNQYK
TEAASRYNLTISDVSVSDVPFPFSAQSGAGVPGWGIALLVLVCVLVALAIVYLIALAVCQ
CRRKNYGQLDIFPARDTYHPMSEYPTYHTHGRYVPPSSTDRSPYEKVSAGNGGSSLS
YTNPAVAAASANLGSGRIFNAHYAGYFADLLIHDIETNPGPLAGETGQEAAPLDGVLAN
PPNISSLSPRQLLGFPCAEVSGLSTERVRELAVALAQKNVKLSTEQLRCLAHRLSEPPE
DLDALPLDLLLFLNPDAFSGPQACTRFFSRITKANVDLLPRGAPERQRLLPAALACWGV
RGSLLSEADVRALGGLACDLPGRFVAESAEVLLPRLVSCPGPLDQDQQEAARAALQG
GGPPYGPPSTWSVSTMDALRGLLPVLGQPIIRSIPQGIVAAWRQRSSRDPSWRQPERT
ILRPRFRREVEKTACPSGKKAREIDESLIFYKKWELEACVDAALLATQMDRVNAIPFTYE
QLDVLKHKLDELYPQGYPESVIQHLGYLFLKMSPEDIRKWNVTSLETLKALLEVNKGHE
MSPQVATLIDRFVKGRGQLDKDTLDTLTAFYPGYLCSLSPEELSSVPPSSIWAVRPQDL
DTCDPRQLDVLYPKARLAFQNMNGSEYFVKIQSFLGGAPTEDLKALSQQNVSMDLATF
MKLRTDAVLPLTVAEVQKLLGPHVEGLKAEERHRPVRDWILRQRQDDLDTLGLGLQG
GIPNGYLVLDLSMQEALGSGEGRGSLLTCGDVEENPGPSFLLSSLRPSLTGARRLVETI
FLGSRPWMPGTPRRLPRLPQRYWQMRPLFLELLGNHAQCPYGVLLKTHCPLRAAVTP
AAGVCAREKPQGSVAAPEEEDTDPRRLVQLLRQHSSPWQVYGFVRACLRRLVPPGL
WGSRHNERRFLRNTKKFISLGKHAKLSLQELTWKMSVRDCAWLRRSPGVGCVPAAEH
RLREEILAKFLHWLMSVYVVELLRSFFYVTETTFQKNRLFFYRKSVVVSKLQSIGIRQHLK
RVQLRELSEAEVRQHREARPALLTSRLRFIPKPDGLRPIVNMDYVVGARTFRREKRAE
RLTSRVKALFSVLNYERARRPGLLGASVLGLDDIHRAWRTFVLRVRAQDPPPELYFVK
VAITGAYDTIPQDRLTEVIASIIKPQNTYCVRRYAVVQKAAHGHVRKAFKSHVSTLTDLQ
PYMRQFVAHLQETSPLRDAVVIEQSSSLNEASSGLFDVFLRFMCHHAVRIRGKSYVQC
QGIPQGSILSTLLCSLCYGDMENKLFAGIRRDGLLLRLVDDFLLVTPHLTHAKTFLRTLV
RGVPEYGCVVNLRKTVVNFPVEDEALGGTAFVQMPAHGLFPWCGLLLDTRTLEVQSD
YSSYARTSIRASLTFNRGFKAGRNMRRKLFGVLRLKCHSLFLDLQVNSLQTVCTNIYKIL
LLQAYRFHACVLQLPFHQQVWKNPTFFLRVISDTASLCYSILKAKNAGMSLGAKGAAG
PLPSEAVQWLCHQAFLLKLTRHRVTYVPLLGSLRTAQTQLSRKLPGTTLTALEAAANPA
LPSDFKTILD
SEQ ID NO: 63-Plasmid 1355 ORF
atggctagcctggctggcgagacaggacaggaagccgctcctctggacggcgtgctggccaaccctcccaatatcagc
agcctgagccccagacagctgctgggattcccttgtgccgaggtgtccggcctgagcacagagagagtgcgggaactgg
ctgtggccctggcccagaaaaacgtgaagctgagcaccgagcagctgcggtgcctggcccacagactgtctgagcctcc
cgaggatctggacgccctgcctctggatctgctgctgttcctgaaccccgacgccttcagcggacctcaggcctgcacccg
gttcttcagcagaatcaccaaggccaacgtggacctgctgcccagaggcgcccctgagagacagagactgctgcctgct
gctctggcctgttggggagtgcggggctctctgctgtctgaagctgatgtgcgggccctgggaggcctggcttgtgatctgcc
tggaagattcgtggccgagagcgccgaagtgctgctgcctagactggtgtcctgtcccggccctctggaccaggatcagc
aggaagctgccagagctgctctgcagggcggaggccctccttatggacctcctagcacttggagcgtgtccaccatggat
gccctgaggggcctgctgccagtgctgggccagcctatcatcagatccatcccacagggcatcgtggccgcctggcggc
agagaagctctagagatccctcttggcggcagcccgagcggacaatcctgcggcccaggtttcggagagaggtggaaa
agaccgcctgcccctctggcaagaaggccagagagatcgacgagagcctgatcttctacaagaagtgggagctggaa
gcctgcgtggacgccgctctgctggccacccagatggacagagtgaacgccatccccttcacctatgagcagctggacgt
gctgaagcacaagctggatgagctgtacccccagggctaccccgagagcgtgatccagcacctgggctacctgtttctga
agatgagccccgaggacatccggaagtggaacgtgaccagcctggaaaccctgaaggccctgctggaagtgaacaa
gggccacgagatgtccccccaggtggccacactgatcgacagattcgtgaagggcagaggccagctggacaaggaca
ccctggatacactgaccgccttctaccccggctatctgtgcagcctgtcccccgaggaactgagcagcgtgccacctagct
ctatctgggctgtgcggccccaggacctggatacctgcgatcctagacagctggatgtgctgtatcccaaggcccggctgg
ccttccagaacatgaacggcagcgagtacttcgtgaagatccagtccttcctgggcggagcccctaccgaggacctgaa
agctctgagccagcagaacgtgtccatggatctggccacctttatgaagctgcggaccgacgccgtgctgcctctgacagt
ggctgaggtgcagaaactgctgggcccccatgtggaagggctgaaggccgaagaacggcacagacccgtgcgcgac
tggatcctgaggcagagacaggatgacctggacacactgggcctgggactgcaggggggcatccctaatggctacctg
gtgctggacctgagcatgcaggaagccctgggatccggcagaatcttcaacgcccactacgccggctacttcgccgacct
gctgatccacgacatcgagacaaaccctggccccacccctggaacccagagccccttcttccttctgctgctgctgaccgt
gctgactgtcgtgacaggctctggccacgccagctctacacctggcggcgagaaagagacaagcgccacccagagaa
gcagcgtgccaagcagcaccgagaagaacgccgtgtccatgaccagctccgtgctgagcagccactctcctggcagcg
gcagcagcacaacacagggccaggatgtgacactggcccctgccacagaacctgcctctggatctgccgccacctggg
gacaggacgtgacaagcgtgccagtgaccagacctgccctgggctctacaacaccccctgcccacgatgtgaccagcg
cccctgataacaagcctgcccctggaagcacagcccctccagctcatggcgtgacctctgccccagataccagaccagc
cccaggatctacagccccacccgcacacggcgtgacaagtgcccctgacacaagacccgctccaggctctactgctcct
cctgcccatggcgtgacaagcgctcccgatacaaggccagctcctggctccacagcaccaccagcacatggcgtgaca
tcagctcccgacactagacctgctcccggatcaaccgctccaccagctcacggcgtgaccagcgcacctgataccagac
ctgctctgggaagcaccgcccctcccgtgcacaatgtgacatctgcttccggcagcgccagcggctctgcctctacactggt
gcacaacggcaccagcgccagagccacaacaaccccagccagcaagagcacccccttcagcatccctagccacca
cagcgacacccctaccacactggccagccactccaccaagaccgatgcctctagcacccaccactccagcgtgccccc
tctgaccagcagcaaccacagcacaagcccccagctgtctaccggcgtctcattcttctttctgtccttccacatcagcaacc
tgcagttcaacagcagcctggaagatcccagcaccgactactaccaggaactgcagcgggatatcagcgagatgttcct
gcaaatctacaagcagggcggcttcctgggcctgagcaacatcaagttcagacccggcagcgtggtggtgcagctgacc
ctggctttccgggaaggcaccatcaacgtgcacgacgtggaaacccagttcaaccagtacaagaccgaggccgccag
ccggtacaacctgaccatctccgatgtgtccgtgtccgacgtgcccttcccattctctgcccagtctggcgcaggcgtgccag
gatggggaattgctctgctggtgctcgtgtgcgtgctggtggccctggccatcgtgtatctgattgccctggccgtgtgccagt
gccggcggaagaattacggccagctggacatcttccccgccagagacacctaccaccccatgagcgagtaccccacat
accacacccacggcagatacgtgccacccagctccaccgacagatccccctacgagaaagtgtctgccggcaacggc
ggcagctccctgagctacacaaatcctgccgtggccgctgcctccgccaacctgggatccggcacaatcctgtctgaggg
cgccaccaacttcagcctgctgaaactggccggcgacgtggaactgaaccctggccctagcttcctcctgtcgtcgctcag
accgagcctgaccggagcacgcagattggtggaaactatcttccttgggtcacgtccgtggatgccaggtaccccacggc
gcctcccgcgcctcccacagagatactggcagatgcggcctctgttcctggaattgctgggaaaccacgctcagtgcccgt
acggagtcctgctcaagactcactgccctctgagggcggcggtcactccggcggccggagtgtgcgcacgggagaagc
cccagggaagcgtggcagctccggaagaggaggacaccgatccgcgccgcctcgtgcaacttctgcgccagcactcct
cgccctggcaagtctacgggttcgtccgcgcctgcctgcgccgcctggtgccgcctgggctctggggttcccggcataacg
agcgccgcttcctgagaaatactaagaagtttatctcacttggaaaacatgccaagttgtcgctgcaagaactcacgtgga
agatgtcagtccgcgattgcgcctggctgcgccgctcgccgggcgtcgggtgtgttccagctgcagaacaccgcctgaga
gaagaaattctggccaaatttctgcattggctgatgtcagtgtacgtggtcgagctgctgcgctcctttttctacgtcactgaga
ctacctttcaaaagaaccgcctgttcttctaccgcaaatctgtgtggagcaagctgcagtcaatcggcattcgccagcatctg
aagagggtgcagctgcgggaactttccgaggcagaagtccgccagcaccgggaggcccggccggcgcttctcacgtc
gcgtctgagattcatcccaaagcccgacgggctgaggcctatcgtcaacatggattacgtcgtgggcgctcgcacctttcg
ccgtgaaaagcgggccgaacgcttgacctcacgggtgaaggccctcttctccgtgctgaactacgagagagcaagacg
gcctggcctgctgggagcttcggtgctgggactggacgatatccaccgggcttggcggacctttgttctccgggtgagagcc
caagaccctccgccggaactgtacttcgtgaaggtggcgatcaccggagcctatgatactattccgcaagatcgactcac
cgaagtcatcgcctcgatcatcaaaccgcagaacacttactgcgtcaggcggtacgccgtggtccagaaggccgcgcat
ggccacgtgagaaaggcgttcaagtcgcacgtgtccactctcaccgacctccagccttacatgaggcaattcgttgcgcat
ttgcaagagacttcgcccctgagagatgcggtggtcatcgagcagagctccagcctgaacgaagcgagcagcggtctgt
ttgacgtgttcctccgcttcatgtgtcatcacgcggtgcgaatcaggggaaaatcatacgtgcagtgccagggaatcccaca
aggcagcattctgtcgactctcttgtgttccctttgctacggcgatatggaaaacaagctgttcgctgggatcagacgggacg
ggttgctgctcagactggtggacgacttcctgctggtgactccgcacctcactcacgccaaaacctttctccgcactctggtg
aggggagtgccagaatacggctgtgtggtcaatctccggaaaactgtggtgaatttccctgtcgaggatgaggcactcgg
aggaaccgcatttgtccaaatgccagcacatggcctgttcccatggtgcggtctgctgctggacacccgaactcttgaagtg
cagtccgactactccagctatgcccggacgagcatccgcgccagcctcactttcaatcgcggctttaaggccggacgaaa
catgcgcagaaagcttttcggagtcctccggcttaaatgccattcgctctttctcgatctccaagtcaattcgctgcagaccgt
gtgcacgaacatctacaagatcctgctgctccaagcctaccggttccacgcttgcgtgcttcagctgccgtttcaccaacag
gtgtggaagaacccgaccttctttctgcgggtcattagcgatactgcctccctgtgttactcaatcctcaaggcaaagaacgc
cggaatgtcgctgggtgcgaaaggagccgcgggacctcttcctagcgaagcggtgcagtggctctgccaccaggctttcc
tcctgaagctgaccaggcacagagtgacctacgtcccgctgctgggctcgctgcgcactgcacagacccagctgtctaga
aaactccccggcaccaccctgaccgctctggaagccgccgccaacccagcattgccgtcagatttcaagaccatcttgga
C
SEQ ID NO: 64-Plasmid 1355 Polypeptide
MASLAGETGQEAAPLDGVLANPPNISSLSPRQLLGFPCAEVSGLSTERVRELAVALAQ
KNVKLSTEQLRCLAHRLSEPPEDLDALPLDLLLFLNPDAFSGPQACTRFFSRITKANVDL
LPRGAPERQRLLPAALACWGVRGSLLSEADVRALGGLACDLPGRFVAESAEVLLPRLV
SCPGPLDQDQQEAARAALQGGGPPYGPPSTWSVSTMDALRGLLPVLGQPIIRSIPQGI
VAAWRQRSSRDPSWRQPERTILRPRFRREVEKTACPSGKKAREIDESLIFYKKWELEA
CVDAALLATQMDRVNAIPFTYEQLDVLKHKLDELYPQGYPESVIQHLGYLFLKMSPEDI
RKWNVTSLETLKALLEVNKGHEMSPQVATLIDRFVKGRGQLDKDTLDTLTAFYPGYLC
SLSPEELSSVPPSSIWAVRPQDLDTCDPRQLDVLYPKARLAFQNMNGSEYFVKIQSFL
GGAPTEDLKALSQQNVSMDLATFMKLRTDAVLPLTVAEVQKLLGPHVEGLKAEERHRP
VRDWILRQRQDDLDTLGLGLQGGIPNGYLVLDLSMQEALGSGRIFNAHYAGYFADLLIH
DIETNPGPTPGTQSPFFLLLLLTVLTVVTGSGHASSTPGGEKETSATQRSSVPSSTEKN
AVSMTSSVLSSHSPGSGSSTTQGQDVTLAPATEPASGSAATWGQDVTSVPVTRPALG
STTPPAHDVTSAPDNKPAPGSTAPPAHGVTSAPDTRPAPGSTAPPAHGVTSAPDTRP
APGSTAPPAHGVTSAPDTRPAPGSTAPPAHGVTSAPDTRPAPGSTAPPAHGVTSAPD
TRPALGSTAPPVHNVTSASGSASGSASTLVHNGTSARATTTPASKSTPFSIPSHHSDTP
TTLASHSTKTDASSTHHSSVPPLTSSNHSTSPQLSTGVSFFFLSFHISNLQFNSSLEDPS
TDYYQELQRDISEMFLQIYKQGGFLGLSNIKFRPGSWVQLTLAFREGTINVHDVETQF
NQYKTEAASRYNLTISDVSVSDVPFPFSAQSGAGVPGWGIALLVLVCVLVALAIVYLIAL
AVCQCRRKNYGQLDIFPARDTYHPMSEYPTYHTHGRYVPPSSTDRSPYEKVSAGNGG
SSLSYTNPAVAAASANLGSGTILSEGATNFSLLKLAGDVELNPGPSFLLSSLRPSLTGA
RRLVETIFLGSRPWMPGTPRRLPRLPQRYWQMRPLFLELLGNHAQCPYGVLLKTHCP
LRAAVTPAAGVCAREKPQGSVAAPEEEDTDPRRLVQLLRQHSSPWQVYGFVRACLRR
LVPPGLWGSRHNERRFLRNTKKFISLGKHAKLSLQELTWKMSVRDCAWLRRSPGVGC
VPAAEHRLREEILAKFLHWLMSVYVVELLRSFFYVTETTFQKNRLFFYRKSVWSKLQSI
GIRQHLKRVQLRELSEAEVRQHREARPALLTSRLRFIPKPDGLRPIVNMDYVVGARTFR
REKRAERLTSRVKALFSVLNYERARRPGLLGASVLGLDDIHRAWRTFVLRVRAQDPPP
ELYFVKVAITGAYDTIPQDRLTEVIASIIKPQNTYCVRRYAVVQKAAHGHVRKAFKSHVS
TLTDLQPYMRQFVAHLQETSPLRDAVVIEQSSSLNEASSGLFDVFLRFMCHHAVRIRGK
SYVQCQGIPQGSILSTLLCSLCYGDMENKLFAGIRRDGLLLRLVDDFLLVTPHLTHAKTF
LRTLVRGVPEYGCVVNLRKTVVNFPVEDEALGGTAFVQMPAHGLFPWCGLLLDTRTLE
VQSDYSSYARTSIRASLTFNRGFKAGRNMRRKLFGVLRLKCHSLFLDLQVNSLQTVCT
NIYKILLLQAYRFHACVLQLPFHQQVVVKNPTFFLRVISDTASLCYSILKAKNAGMSLGAK
GAAGPLPSEAVQWLCHQAFLLKLTRHRVTYVPLLGSLRTAQTQLSRKLPGTTLTALEA
AANPALPSDFKTILD
SEQ ID NO: 65-Plasmid 1356 ORF
atggctagcctggctggcgagacaggacaggaagccgctcctctggacggcgtgctggccaaccctcccaatatcagc
agcctgagccccagacagctgctgggattcccttgtgccgaggtgtccggcctgagcacagagagagtgcgggaactgg
ctgtggccctggcccagaaaaacgtgaagctgagcaccgagcagctgcggtgcctggcccacagactgtctgagcctcc
cgaggatctggacgccctgcctctggatctgctgctgttcctgaaccccgacgccttcagcggacctcaggcctgcacccg
gttcttcagcagaatcaccaaggccaacgtggacctgctgcccagaggcgcccctgagagacagagactgctgcctgct
gctctggcctgttggggagtgcggggctctctgctgtctgaagctgatgtgcgggccctgggaggcctggcttgtgatctgcc
tggaagattcgtggccgagagcgccgaagtgctgctgcctagactggtgtcctgtcccggccctctggaccaggatcagc
aggaagctgccagagctgctctgcagggcggaggccctccttatggacctcctagcacttggagcgtgtccaccatggat
gccctgaggggcctgctgccagtgctgggccagcctatcatcagatccatcccacagggcatcgtggccgcctggcggc
agagaagctctagagatccctcttggcggcagcccgagcggacaatcctgcggcccaggtttcggagagaggtggaaa
agaccgcctgcccctctggcaagaaggccagagagatcgacgagagcctgatcttctacaagaagtgggagctggaa
gcctgcgtggacgccgctctgctggccacccagatggacagagtgaacgccatccccttcacctatgagcagctggacgt
gctgaagcacaagctggatgagctgtacccccagggctaccccgagagcgtgatccagcacctgggctacctgtttctga
agatgagccccgaggacatccggaagtggaacgtgaccagcctggaaaccctgaaggccctgctggaagtgaacaa
gggccacgagatgtccccccaggtggccacactgatcgacagattcgtgaagggcagaggccagctggacaaggaca
ccctggatacactgaccgccttctaccccggctatctgtgcagcctgtcccccgaggaactgagcagcgtgccacctagct
ctatctgggctgtgcggccccaggacctggatacctgcgatcctagacagctggatgtgctgtatcccaaggcccggctgg
ccttccagaacatgaacggcagcgagtacttcgtgaagatccagtccttcctgggcggagcccctaccgaggacctgaa
agctctgagccagcagaacgtgtccatggatctggccacctttatgaagctgcggaccgacgccgtgctgcctctgacagt
ggctgaggtgcagaaactgctgggcccccatgtggaagggctgaaggccgaagaacggcacagacccgtgcgcgac
tggatcctgaggcagagacaggatgacctggacacactgggcctgggactgcaggggggcatccctaatggctacctg
gtgctggacctgagcatgcaggaagccctgggatccggcgagggcagaggcagcctgctgacatgtggcgacgtgga
agagaaccctggccccagcttcctcctgtcgtcgctcagaccgagcctgaccggagcacgcagattggtggaaactatctt
ccttgggtcacgtccgtggatgccaggtaccccacggcgcctcccgcgcctcccacagagatactggcagatgcggcctc
tgttcctggaattgctgggaaaccacgctcagtgcccgtacggagtcctgctcaagactcactgccctctgagggcggcgg
tcactccggcggccggagtgtgcgcacgggagaagccccagggaagcgtggcagctccggaagaggaggacaccg
atccgcgccgcctcgtgcaacttctgcgccagcactcctcgccctggcaagtctacgggttcgtccgcgcctgcctgcgcc
gcctggtgccgcctgggctctggggttcccggcataacgagcgccgcttcctgagaaatactaagaagtttatctcacttgg
aaaacatgccaagttgtcgctgcaagaactcacgtggaagatgtcagtccgcgattgcgcctggctgcgccgctcgccgg
gcgtcgggtgtgttccagctgcagaacaccgcctgagagaagaaattctggccaaatttctgcattggctgatgtcagtgta
cgtggtcgagctgctgcgctcctttttctacgtcactgagactacctttcaaaagaaccgcctgttcttctaccgcaaatctgtgt
ggagcaagctgcagtcaatcggcattcgccagcatctgaagagggtgcagctgcgggaactttccgaggcagaagtcc
gccagcaccgggaggcccggccggcgcttctcacgtcgcgtctgagattcatcccaaagcccgacgggctgaggcctat
cgtcaacatggattacgtcgtgggcgctcgcacctttcgccgtgaaaagcgggccgaacgcttgacctcacgggtgaagg
ccctcttctccgtgctgaactacgagagagcaagacggcctggcctgctgggagcttcggtgctgggactggacgatatcc
accgggcttggcggacctttgttctccgggtgagagcccaagaccctccgccggaactgtacttcgtgaaggtggcgatca
ccggagcctatgatactattccgcaagatcgactcaccgaagtcatcgcctcgatcatcaaaccgcagaacacttactgcg
tcaggcggtacgccgtggtccagaaggccgcgcatggccacgtgagaaaggcgttcaagtcgcacgtgtccactctcac
cgacctccagccttacatgaggcaattcgttgcgcatttgcaagagacttcgcccctgagagatgcggtggtcatcgagca
gagctccagcctgaacgaagcgagcagcggtctgtttgacgtgttcctccgcttcatgtgtcatcacgcggtgcgaatcagg
ggaaaatcatacgtgcagtgccagggaatcccacaaggcagcattctgtcgactctcttgtgttccctttgctacggcgatat
ggaaaacaagctgttcgctgggatcagacgggacgggttgctgctcagactggtggacgacttcctgctggtgactccgc
acctcactcacgccaaaacctttctccgcactctggtgaggggagtgccagaatacggctgtgtggtcaatctccggaaaa
ctgtggtgaatttccctgtcgaggatgaggcactcggaggaaccgcatttgtccaaatgccagcacatggcctgttcccatg
gtgcggtctgctgctggacacccgaactcttgaagtgcagtccgactactccagctatgcccggacgagcatccgcgcca
gcctcactttcaatcgcggctttaaggccggacgaaacatgcgcagaaagcttttcggagtcctccggcttaaatgccattc
gctctttctcgatctccaagtcaattcgctgcagaccgtgtgcacgaacatctacaagatcctgctgctccaagcctaccggtt
ccacgcttgcgtgcttcagctgccgtttcaccaacaggtgtggaagaacccgaccttctttctgcgggtcattagcgatactg
cctccctgtgttactcaatcctcaaggcaaagaacgccggaatgtcgctgggtgcgaaaggagccgcgggacctcttcct
agcgaagcggtgcagtggctctgccaccaggctttcctcctgaagctgaccaggcacagagtgacctacgtcccgctgct
gggctcgctgcgcactgcacagacccagctgtctagaaaactccccggcaccaccctgaccgctctggaagccgccgc
caacccagcattgccgtcagatttcaagaccatcttggacggatccggcacaatcctgtctgagggcgccaccaacttcag
cctgctgaaactggccggcgacgtggaactgaaccctggccctacccctggaacccagagccccttcttccttctgctgctg
ctgaccgtgctgactgtcgtgacaggctctggccacgccagctctacacctggcggcgagaaagagacaagcgccacc
cagagaagcagcgtgccaagcagcaccgagaagaacgccgtgtccatgaccagctccgtgctgagcagccactctcct
ggcagcggcagcagcacaacacagggccaggatgtgacactggcccctgccacagaacctgcctctggatctgccgc
cacctggggacaggacgtgacaagcgtgccagtgaccagacctgccctgggctctacaacaccccctgcccacgatgt
gaccagcgcccctgataacaagcctgcccctggaagcacagcccctccagctcatggcgtgacctctgccccagatacc
agaccagccccaggatctacagccccacccgcacacggcgtgacaagtgcccctgacacaagacccgctccaggctc
tactgctcctcctgcccatggcgtgacaagcgctcccgatacaaggccagctcctggctccacagcaccaccagcacatg
gcgtgacatcagctcccgacactagacctgctcccggatcaaccgctccaccagctcacggcgtgaccagcgcacctga
taccagacctgctctgggaagcaccgcccctcccgtgcacaatgtgacatctgcttccggcagcgccagcggctctgcctc
tacactggtgcacaacggcaccagcgccagagccacaacaaccccagccagcaagagcacccccttcagcatcccta
gccaccacagcgacacccctaccacactggccagccactccaccaagaccgatgcctctagcacccaccactccagc
gtgccccctctgaccagcagcaaccacagcacaagcccccagctgtctaccggcgtctcattcttctttctgtccttccacat
cagcaacctgcagttcaacagcagcctggaagatcccagcaccgactactaccaggaactgcagcgggatatcagcg
agatgttcctgcaaatctacaagcagggcggcttcctgggcctgagcaacatcaagttcagacccggcagcgtggtggtg
cagctgaccctggctttccgggaaggcaccatcaacgtgcacgacgtggaaacccagttcaaccagtacaagaccgag
gccgccagccggtacaacctgaccatctccgatgtgtccgtgtccgacgtgcccttcccattctctgcccagtctggcgcag
gcgtgccaggatggggaattgctctgctggtgctcgtgtgcgtgctggtggccctggccatcgtgtatctgattgccctggccg
tgtgccagtgccggcggaagaattacggccagctggacatcttccccgccagagacacctaccaccccatgagcgagta
ccccacataccacacccacggcagatacgtgccacccagctccaccgacagatccccctacgagaaagtgtctgccgg
caacggcggcagctccctgagctacacaaatcctgccgtggccgctgcctccgccaacctg
SEQ ID NO: 66-Plasmid 1356 Polypeptide
MASLAGETGQEAAPLDGVLANPPNISSLSPRQLLGFPCAEVSGLSTERVRELAVALAQ
KNVKLSTEQLRCLAHRLSEPPEDLDALPLDLLLFLNPDAFSGPQACTRFFSRITKANVDL
LPRGAPERQRLLPAALACWGVRGSLLSEADVRALGGLACDLPGRFVAESAEVLLPRLV
SCPGPLDQDQQEAARAALQGGGPPYGPPSTWSVSTMDALRGLLPVLGQPIIRSIPQGI
VAAWRQRSSRDPSWRQPERTILRPRFRREVEKTACPSGKKAREIDESLIFYKKWELEA
CVDAALLATQMDRVNAIPFTYEQLDVLKHKLDELYPQGYPESVIQHLGYLFLKMSPEDI
RKWNVTSLETLKALLEVNKGHEMSPQVATLIDRFVKGRGQLDKDTLDTLTAFYPGYLC
SLSPEELSSVPPSSIWAVRPQDLDTCDPRQLDVLYPKARLAFQNMNGSEYFVKIQSFL
GGAPTEDLKALSQQNVSMDLATFMKLRTDAVLPLTVAEVQKLLGPHVEGLKAEERHRP
VRDWILRQRQDDLDTLGLGLQGGIPNGYLVLDLSMQEALGSGEGRGSLLTCGDVEEN
PGPSFLLSSLRPSLTGARRLVETIFLGSRPWMPGTPRRLPRLPQRYVVQMRPLFLELLG
NHAQCPYGVLLKTHCPLRAAVTPAAGVCAREKPQGSVAAPEEEDTDPRRLVQLLRQH
SSPWQVYGFVRACLRRLVPPGLWGSRHNERRFLRNTKKFISLGKHAKLSLQELTWKM
SVRDCAWLRRSPGVGCVPAAEHRLREEILAKFLHWLMSVYVVELLRSFFYVTETTFQK
NRLFFYRKSVWSKLQSIGIRQHLKRVQLRELSEAEVRQHREARPALLTSRLRFIPKPDG
LRPIVNMDYWGARTFRREKRAERLTSRVKALFSVLNYERARRPGLLGASVLGLDDIHR
AWRTFVLRVRAQDPPPELYFVKVAITGAYDTIPQDRLTEVIASIIKPQNTYCVRRYAWQ
KAAHGHVRKAFKSHVSTLTDLQPYMRQFVAHLQETSPLRDAW1EQSSSLNEASSGLF
DVFLRFMCHHAVRIRGKSYVQCQGIPQGSILSTLLCSLCYGDMENKLFAGIRRDGLLLR
LVDDFLLVTPHLTHAKTFLRTLVRGVPEYGCVVNLRKTVVNFPVEDEALGGTAFVQMP
AHGLFPWCGLLLDTRTLEVQSDYSSYARTSIRASLTFNRGFKAGRNMRRKLFGVLRLK
CHSLFLDLQVNSLQTVCTNIYKILLLQAYRFHACVLQLPFHQQVWKNPTFFLRVISDTAS
LCYSILKAKNAGMSLGAKGAAGPLPSEAVQWLCHQAFLLKLTRHRVTYVPLLGSLRTA
QTQLSRKLPGTTLTALEAAANPALPSDFKTILDGSGTILSEGATNFSLLKLAGDVELNPG
PTPGTQSPFFLLLLLTVLTVVTGSGHASSTPGGEKETSATQRSSVPSSTEKNAVSMTS
SVLSSHSPGSGSSTTQGQDVTLAPATEPASGSAATWGQDVTSVPVTRPALGSTTPPA
HDVTSAPDNKPAPGSTAPPAHGVTSAPDTRPAPGSTAPPAHGVTSAPDTRPAPGSTA
PPAHGVTSAPDTRPAPGSTAPPAHGVTSAPDTRPAPGSTAPPAHGVTSAPDTRPALG
STAPPVHNVTSASGSASGSASTLVHNGTSARATTTPASKSTPFSIPSHHSDTPTTLASH
STKTDASSTHHSSVPPLTSSNHSTSPQLSTGVSFFFLSFHISNLQFNSSLEDPSTDYYQ
ELQRDISEMFLQIYKQGGFLGLSNIKFRPGSVWQLTLAFREGTINVHDVETQFNQYKT
EAASRYNLTISDVSVSDVPFPFSAQSGAGVPGWGIALLVLVCVLVALAIVYLIALAVCQC
RRKNYGQLDIFPARDTYHPMSEYPTYHTHGRYVPPSSTDRSPYEKVSAGNGGSSLSY
TNPAVAAASANL

### 2A Peptides (SEQ ID NOS: 67-74)

[0417] The amino acid sequence of the 2A peptides set forth in SEQ ID NOs: 67-74 includes a glycine-serine-glycine (GSG) linker encoded by the nucleic acid sequence GGATCCGGC.

Encephalomyocarditis Virus (EMCV) 2A Nucleotide
sequence:
SEQ ID NO: 67
ggatccggcagaatcttcaacgcccactacgccggctacttcgccgac
ctgctgatccacgacatcgagacaaaccctggcccc
Encephalomyocarditis Virus (EMCV) 2A Amino acid
sequence:
SEQ ID NO: 68
GSGRIFNAHYAGYFADLLIHDIETNPGP
Thosea Asigna Virus (TAV) 2A Nucleotide sequence:
SEQ ID NO: 69
ggatccggcgagggcagaggcagcctgctgacatgtggcgacgtggaa
gagaaccctggcccc
Thosea Asigna Virus (TAV) 2A Amino acid sequence:
SEQ ID NO: 70
GSGEGRGSLLTCGDVEENPGP
Equine Rhinitis B Virus (ERBV) 2A Nucleotide
sequence:
SEQ ID NO: 71
ggatccggcacaatcctgtctgagggcgccaccaacttcagcctgctg
aaactggccggcgacgtggaactgaaccctggccct
Equine Rhinitis B Virus (ERBV) 2A Amino acid
sequence:
SEQ ID NO: 72
GSGTILSEGATNFSLLKLAGDVELNPGP
Porcine teschovirus (PTV) 2A Nucleotide sequence:
SEQ ID NO: 73
ggatccggcgccaccaatttcagcctgctgaaacaggccggcgacgtg
gaagagaaccctggccct
Porcine teschovirus (PTV) 2A Amino acid sequence:
SEQ ID NO: 74
GSGATNFSLLKQAGDVEENPGP

### Primers Used for Construction of Plasmids Described in the Examples

| | | | SEQ |
|---|---|---|---|
| Primer | SEQUENCE (5′ TO 3′) | Strand | ID NO |
| EMCV_cMSLN_F- | GAGACAAACCCTGGCCCCCTGGCTGGCGAGACAGGAC | Sense | 75 |
| 33 | AGGAAG | | |
| EMCV_Muc1_R- | GTTGAAGATTCTGCCGGATCCCAGGTTGGCGGAGGCA | Antisense | 76 |
| 35 | GCGGCCACG | | |
| EMCV2A_F-34 | GCTACTTCGCCGACCTGCTGATCCACGACATCGAGACA | Sense | 77 |
| | AACCCTGGC | | |
| EMCV2A_R-36 | GGTCGGCGAAGTAGCCGGCGTAGTGGGCGTTGAAGAT | Antisense | 78 |
| | TCTGCCGGAT | | |
| f MSLN 1028- | TTCTGAAGATGAGCCCCGAGGACA | Sense | 79 |
| 1051 | | | |
| f Muc 960-983 | CGGCGTCTCATTCTTCTTTCTGTC | Sense | 80 |
| f pmed Nhe | ACCCTGTGACGAACATGGCTAGCCTGGCTGGCGAGAC | Sense | 81 |
| cMSLN | AGGACAGGA | | |
| f pmed Nhe | ACCCTGTGACGAACATGGCTAGCACAGGCTCTGGCCAC | Sense | 82 |
| cytMuc | GCCAG | | |
| f pmed Nhe Muc | ACCCTGTGACGAACATGGCTAGCACCCCTGGAACCCAG | Sense | 83 |
| | AGCC | | |
| f pmed Nhe | ACCCTGTGACGAACATGGCTAGCGGAGCTGCCCCGGA | Sense | 84 |
| Ter240 | GCCGG | | |
| f tert 1584-1607 | TCTCACCGACCTCCAGCCTTACAT | Sense | 85 |
| f tert ink cMSLN | ACGGAGGCTCCGGCGGACTGGCTGGCGAGACAGGACA | Sense | 86 |
| f tg link Ter240 | TGGGAGGCTCCGGCGGAGGAGCTGCCCCGGAGCCGG | Sense | 87 |
| f1 EM2A Muc | CCTGCTGATCCACGACATCGAGACAAACCCTGGCCCCA | Sense | 88 |
| | CCCCTGGAACCCAGAGCC | | |
| f1 ERBV2A cMuc | TGGCCGGCGACGTGGAACTGAACCCTGGCCCTACAGG | Sense | 89 |
| | CTCTGGCCACGCCAG | | |
| f1 ERBV2A Muc | TGGCCGGCGACGTGGAACTGAACCCTGGCCCTACCCCT | Sense | 90 |
| | GGAACCCAGAGCC | | |
| f1 ERBV2A Ter | TGGCCGGCGACGTGGAACTGAACCCTGGCCCTAGCTTC | Sense | 91 |
| d342 | CTCCTGTCGTCGCTCA | | |
| f1 ERBV2A Ter240 | TGGCCGGCGACGTGGAACTGAACCCTGGCCCTGGAGC | Sense | 92 |
| | TGCCCCGGAGCCGG | | |
| f1 ERBV2A Tert | TGGCCGGCGACGTGGAACTGAACCCTGGCCCTGCCAA | Sense | 93 |
| d541 | ATTTCTGCATTGGCTGATG | | |
| f1 PTV2A cMSLN | TGGAAGAGAACCCTGGCCCTCTGGCTGGCGAGACAGG | Sense | 94 |
| | ACAGGA | | |
| f1 PTV2A Muc | TGGAAGAGAACCCTGGCCCTACCCCTGGAACCCAGAGC | Sense | 95 |
| | C | | |
| f1 T2A cMSLN | GCGACGTGGAAGAGAACCCTGGCCCCCTGGCTGGCGA | Sense | 96 |
| | GACAGGACAGGA | | |
| f1 T2A Tert d342 | GCGACGTGGAAGAGAACCCTGGCCCCAGCTTCCTCCTG | Sense | 97 |
| | TCGTCGCTCA | | |
| f1 T2A Tert d541 | GCGACGTGGAAGAGAACCCTGGCCCCGCCAAATTTCTG | Sense | 98 |
| | CATTGGCTGATG | | |
| f1 T2A Tert240 | GCGACGTGGAAGAGAACCCTGGCCCCGGAGCTGCCCC | Sense | 99 |
| | GGAGCCGG | | |
| f2 EMCV2A | AGAATCTTCAACGCCCACTACGCCGGCTACTTCGCCGA | Sense | 100 |
| | CCTGCTGATCCACGACATCGA | | |
| f2 ERBV2A | TGTCTGAGGGCGCCACCAACTTCAGCCTGCTGAAACTG | Sense | 101 |
| | GCCGGCGACGTGGAACTG | | |
| f2 PTV2A | TTCAGCCTGCTGAAACAGGCCGGCGACGTGGAAGAGA | Sense | 102 |
| | ACCCTGGCCCT | | |
| f2 T2A | CCGGCGAGGGCAGAGGCAGCCTGCTGACATGTGGCGA | Sense | 103 |
| | CGTGGAAGAGAACCCTG | | |
| pMED_cMSLN_R- | GGGCCCAGATCTTCACAGGGCTTCCTGCATGCTCAGGT | Antisense | 104 |
| 37 | CCAGCAC | | |
| pMED_MUC1_F- | ACGAACATGGCTAGCACCCCTGGAACCCAGAGCCCCTT | Sense | 105 |
| 31 | C | | |
| r EM2A Bamh | GTGGGCGTTGAAGATTCTGCCGGATCCCAGGGCTTCCT | Antisense | 106 |
| cMSLN | GCATGCTCAGGT | | |
| r ERB2A Bamh | TGGTGGCGCCCTCAGACAGGATTGTGCCGGATCCCAG | Antisense | 107 |
| Muc | GTTGGCGGAGGCAGCG | | |
| r ERB2A Bamh | TGGTGGCGCCCTCAGACAGGATTGTGCCGGATCCGTCC | Antisense | 108 |
| Ter240 | AAGATGGTCTTGAAATCTGA | | |
| r link cMSLN | TCCGCCGGAGCCTCCCAGGGCTTCCTGCATGCTCAGGT | Antisense | 109 |
| r link muc | TCCGCCGGAGCCTCCCAGGTTGGCGGAGGCAGCG | Antisense | 110 |
| r link Tert240 | TCCGCCGGAGCCTCCGTCCAAGATGGTCTTGAAATCTG | Antisense | 111 |
| | A | | |
| r MSLN 1051- | TGTCCTCGGGGCTCATCTT | Antisense | 112 |
| 1033 | | | |
| r nnuc 986- 63 | AAGGACAGAAAGAAGAATGAGACG | Antisense | 113 |
| r pmed Bgl | TTGTTTTGTTAGGGCCCAGATCTTCACAGGGCTTCCTGC | Antisense | 114 |
| cMSLN | ATGCTCAGG | | |
| r pmed Bgl Muc | TTGTTTTGTTAGGGCCCAGATCTTCACAGGTTGGCGGA | Antisense | 115 |
| | GGCAGCG | | |
| r pmed Bgl | TTGTTTTGTTAGGGCCCAGATCTTCAGTCCAAGATGGTC | Antisense | 116 |
| Ter240 | TTGAAATCTGA | | |
| r PTV2A Bamh | CTGTTTCAGCAGGCTGAAATTGGTGGCGCCGGATCCCA | Antisense | 117 |
| cMSLN | GGGCTTCCTGCATGCTCAGGT | | |
| r PTV2A Bamh | CTGTTTCAGCAGGCTGAAATTGGTGGCGCCGGATCCCA | Antisense | 118 |
| Muc | GGTTGGCGGAGGCAGCG | | |
| r T2A Bamh | TGCCTCTGCCCTCGCCGGATCCCAGGGCTTCCTGCATGC | Antisense | 119 |
| cMSLN | TCAGGT | | |
| r T2A Tert240 | TGCCTCTGCCCTCGCCGGATCCGTCCAAGATGGTCTTGA | Antisense | 120 |
| | AATCTGA | | |
| r tert 1602-1579 | AGGCTGGAGGTCGGTGAGAGTGGA | Antisense | 121 |
| r2 T2A | AGGGTTCTCTTCCACGTCGCCACATGTCAGCAGGCTGC | Antisense | 122 |
| | CTCTGCCCTCGCCGGATCC | | |
| TertΔ343-F | ACGAACATGGCTAGCTTCCTCCTGTCGTCGCTCAGACC | Sense | 123 |
| | GAG | | |
| Tert-R | TTGTTTTGTTAGGGCCCAGATCTTCAGTCCAAGATGGTC | Antisense | 124 |
| | TTGAAATC | | |
| TertΔ541-F | ACGAACATGGCTAGCGCCAAATTTCTGCATTGGCTGAT | Sense | 125 |
| | GTC | | |
| r TERT co# pMed | TTGTTTTGTTAGGGCCCAGATCTTCAGTCCAAGATGGTC | Antisense | 126 |
| | TTGAAATC | | |
| f pmd TERT | ACCCTGTGACGAACATGGGAGCTGCCCCGGAGCCGGA | Sense | 127 |
| 241G | GA | | |
| MSLN34 | CAACAAGCTAGCCTGGCTGGCGAGACAGGACA | Sense | 128 |
| M5LN598 | CAACAAAGATCTTTACAGGGCTTCCTGCATGCACAG | Antisense | 129 |
| ID1197F | ACCCTGTGACGAACATGGCTAGC | Sense | 130 |
| ID1197R | AGATCTGGGCCCTAACA | Antisense | 131 |

1. A multi-antigen construct, which comprises at least two nucleotide sequences selected from the group consisting of:
(i) a nucleotide sequence encoding an immunogenic MUC1 polypeptide and a nucleotide sequence encoding an immunogenic TERT polypeptide;
(ii) a nucleotide sequence encoding an immunogenic MUC1 polypeptide and a nucleotide sequence encoding an immunogenic MSLN polypeptide; and
(iii) a nucleotide sequence encoding an immunogenic TERT polypeptide and a nucleotide sequence encoding an immunogenic MSLN polypeptide.

2. The multi-antigen construct according to claim 1, which comprises: (i) at least one nucleotide sequence encoding an immunogenic MSLN polypeptide; (ii) at least one nucleotide sequence encoding an immunogenic MUC1 polypeptide; and (iii) at least one nucleotide sequence encoding an immunogenic TERT polypeptide.

3. The multi-antigen construct according to claim 1, wherein the immunogenic MUC1 polypeptide comprises an amino acid sequence selected from the group consisting of:
(i) the amino acid sequence of SEQ ID NO:8;
(ii) an amino acid sequence comprising amino acids 4-537 of SEQ ID NO:8;
(iii) an amino acid sequence comprising amino acids 24-537 of SEQ ID NO:8;
(iv) the amino acid sequence of SEQ ID NO:16;
(v) an amino acid sequence comprising amino acids 4-517 of SEQ ID NO:16; and
(vi) an amino acid sequence comprising amino acids 4-517 of SEQ ID NO:16 with the proviso that the amino acid at position 513 is T.

4. The multi-antigen construct according to claim 1, wherein the immunogenic MSLN polypeptide comprises an amino acid sequence selected from the group consisting of:
(i) an amino acid sequence comprising amino acids 37-597 of the amino acid sequence of SEQ ID NO:2;
(ii) an amino acid sequence consisting of amino acids 37-597 of the amino acid sequence of SEQ ID NO:2;
(iii) the amino acid sequence of SEQ ID NO:6; and
(iv) an amino acid sequence comprising amino acids 4-564 of the amino acid sequence of SEQ ID NO:6.

5. The multi-antigen construct according to claim 1, wherein the immunogenic TERT polypeptide comprises an amino acid sequence selected from the group consisting of:
(i) the amino acid sequence of SEQ ID NO:10,
(ii) the amino acid sequence of SEQ ID NO:12; and
(iii) the amino acid sequence of SEQ ID NO:14.

6. The multi-antigen construct according to claim 2, wherein:
(i) the immunogenic MUC1 polypeptide comprises the amino acid sequence selected from the group consisting of:
(1) the amino acid sequence of SEQ ID NO:8;
(2) an amino acid sequence comprising amino acids 4-537 of SEQ ID NO:8;
(3) an amino acid sequence comprising amino acids 24-537 of SEQ ID NO:8;
(4) the amino acid sequence of SEQ ID NO:16;
(5) an amino acid sequence comprising amino acids 4-517 of SEQ ID NO:16; and
(6) an amino acid sequence comprising amino acids 4-517 of SEQ ID NO:16 with the proviso that the amino acid at position 513 is T;
(ii) the immunogenic MSLN polypeptide comprises an amino acid sequence selected from the group consisting of:
(1) an amino acid sequence comprising amino acids 37-597 of SEQ ID NO:2;
(2) an amino acid sequence consisting of amino acids 37-597 of SEQ ID NO:2;
(3) the amino acid sequence of SEQ ID NO:6; and
(4) an amino acid sequence comprising amino acids 4-564 of SEQ ID NO:6; and
(iii) the immunogenic TERT polypeptide comprises an amino acid sequence selected from the group consisting of:
(1) the amino acid sequence of SEQ ID NO:10;
(2) the amino acid sequence of SEQ ID NO:12; and
(3) the amino acid sequence of SEQ ID NO:14.

7. The multi-antigen construct according to claim 1, wherein the nucleotide sequence encoding the immunogenic MUC1 polypeptide is selected from the group consisting of:
(i) the nucleotide sequence of SEQ ID NO:7:
(ii) the nucleotide sequence of SEQ ID NO:15; and
(iii) a degenerate variant of the nucleotide sequence of SEQ ID NO:7 or 15.

8. The multi-antigen construct according to claim 1, wherein the nucleotide sequence encoding the immunogenic MSLN polypeptide is selected from the group consisting of:
(i) the nucleotide sequence of SEQ ID NO:5; and
(ii) a degenerate variant of the nucleotide sequence of SEQ ID NO:5.

9. The multi-antigen construct according to claim 1, wherein the nucleotide sequence encoding the immunogenic TERT polypeptide is selected from the group consisting of:
(i) the nucleotide sequence of SEQ ID NO:17, 19, 21, or 23; and
(ii) a degenerate variant of the nucleotide sequence of SEQ ID NO:17, 19, 21, or 23.

10. The multi-antigen construct according to claim 2, wherein;
(i) the nucleotide sequence encoding the immunogenic MUC1 polypeptide is selected from the group consisting of:
(1) the nucleotide sequence of SEQ ID NO:7:
(2) the nucleotide sequence of SEQ ID NO:15; and
(3) a degenerate variant of the nucleotide sequence of SEQ ID NO:7 or 15;
(ii) the nucleotide sequence encoding the immunogenic MSLN polypeptide is selected from the group consisting of:
(1) the nucleotide sequence of SEQ ID NO:5; and
(2) the degenerate variant of the nucleotide sequence of SEQ ID NO:5; and
(iii) the nucleotide sequence encoding the immunogenic TERT polypeptide is selected from the group consisting of:
(1) the nucleotide sequence of SEQ ID NO:17, 19, 21, or 23; and
(2) a degenerate variant of the nucleotide sequence of SEQ ID NO:17, 19, 21, or 23.

11. The multi-antigen construct according to claim 2, which comprises a nucleotide sequence encoding the amino acid sequence of SEQ ID NO:44, 46, 48, 50, 52, 54, 56, 58, 60, 62, 64, or 66.

12. The multi-antigen construct according to claim 2, which comprises a nucleotide sequence encoding the amino acid sequence of SEQ ID NO:44, 46, 48, or 50.

13. The multi-antigen construct according to claim 2, which comprises a nucleotide sequence encoding the amino acid sequence of SEQ ID NO:44.

14. The multi-antigen construct according to claim 2, which comprises the nucleotide sequence of SEQ ID NO:43, 45, 47, 49, 51, 53, 55, 57, 59, 61, 63, or 65, or a degenerate variant of the nucleotide sequence of SEQ ID NO: 43, 45, 47, 49, 51, 53, 55, 57, 59, 61, 63, or 65.

15. The multi-antigen construct according to claim 2, which comprises the nucleotide sequence of SEQ ID NO:43, 45, 47, or 49, or a degenerate variant of the nucleotide sequence of SEQ ID NO: 43, 45, 47, or 49.

16. The multi-antigen construct according to claim 2, which comprises the nucleotide sequence of SEQ ID NO:43 or a degenerate variant of the nucleotide sequence of SEQ ID NO:43.

17. A vector comprising a multi-antigen construct according to claim 1.

18. A composition comprising a multi-antigen construct according to claim 1.

19. A pharmaceutical composition comprising: (i) a multi-antigen construct according to claim 1; and (ii) a pharmaceutically acceptable carrier.

20. A method of treating cancer in a patient, comprising administering to the patient an effective amount of a pharmaceutical composition according to claim 19.

The application's sequence listing, which the Patent Office published only in electronic form, follows.

SEQUENCE LISTING (621 sequences)

SEQ ID NO: 1 - protein, 1255 aa, Homo sapiens
MTPGTQSPFFLLLLLTVLTVVTGSGHASSTPGGEKETSATQRSSVPSSTEKNAVSMTSSVLSSHSPGSGSSTTQGQDVTLAPATEPASGSAATWGQDVTSVPVTRPALGSTTPPAHDVTSAPDNKPAPGSTAPPAHGVTSAPDTRPAPGSTAPPAHGVTSAPDTRPAPGSTAPPAHGVTSAPDTRPAPGSTAPPAHGVTSAPDTRPAPGSTAPPAHGVTSAPDTRPAPGSTAPPAHGVTSAPDTRPAPGSTAPPAHGVTSAPDTRPAPGSTAPPAHGVTSAPDTRPAPGSTAPPAHGVTSAPDTRPAPGSTAPPAHGVTSAPDTRPAPGSTAPPAHGVTSAPDTRPAPGSTAPPAHGVTSAPDTRPAPGSTAPPAHGVTSAPDTRPAPGSTAPPAHGVTSAPDTRPAPGSTAPPAHGVTSAPDTRPAPGSTAPPAHGVTSAPDTRPAPGSTAPPAHGVTSAPDTRPAPGSTAPPAHGVTSAPDTRPAPGSTAPPAHGVTSAPDTRPAPGSTAPPAHGVTSAPDTRPAPGSTAPPAHGVTSAPDTRPAPGSTAPPAHGVTSAPDTRPAPGSTAPPAHGVTSAPDTRPAPGSTAPPAHGVTSAPDTRPAPGSTAPPAHGVTSAPDTRPAPGSTAPPAHGVTSAPDTRPAPGSTAPPAHGVTSAPDTRPAPGSTAPPAHGVTSAPDTRPAPGSTAPPAHGVTSAPDTRPAPGSTAPPAHGVTSAPDTRPAPGSTAPPAHGVTSAPDTRPAPGSTAPPAHGVTSAPDTRPAPGSTAPPAHGVTSAPDTRPAPGSTAPPAHGVTSAPDTRPAPGSTAPPAHGVTSAPDTRPAPGSTAPPAHGVTSAPDTRPAPGSTAPPAHGVTSAPDTRPAPGSTAPPAHGVTSAPDTRPAPGSTAPPAHGVTSAPDTRPAPGSTAPPAHGVTSAPDTRPAPGSTAPPAHGVTSAPDNRPALGSTAPPVHNVTSASGSASGSASTLVHNGTSARATTTPASKSTPFSIPSHHSDTPTTLASHSTKTDASSTHHSSVPPLTSSNHSTSPQLSTGVSFFFLSFHISNLQFNSSLEDPSTDYYQELQRDISEMFLQIYKQGGFLGLSNIKFRPGSVVVQLTLAFREGTINVHDVETQFNQYKTEAASRYNLTISDVSVSDVPFPFSAQSGAGVPGWGIALLVLVCVLVALAIVYLIALAVCQCRRKNYGQLDIFPARDTYHPMSEYPTYHTHGRYVPPSSTDRSPYEKVSAGNGGSSLSYTNPAVAATSANL

SEQ ID NO: 2 - protein, 622 aa, Homo sapiens
MALPTARPLLGSCGTPALGSLLFLLFSLGWVQPSRTLAGETGQEAAPLDGVLANPPNISSLSPRQLLGFPCAEVSGLSTERVRELAVALAQKNVKLSTEQLRCLAHRLSEPPEDLDALPLDLLLFLNPDAFSGPQACTRFFSRITKANVDLLPRGAPERQRLLPAALACWGVRGSLLSEADVRALGGLACDLPGRFVAESAEVLLPRLVSCPGPLDQDQQEAARAALQGGGPPYGPPSTWSVSTMDALRGLLPVLGQPIIRSIPQGIVAAWRQRSSRDPSWRQPERTILRPRFRREVEKTACPSGKKAREIDESLIFYKKWELEACVDAALLATQMDRVNAIPFTYEQLDVLKHKLDELYPQGYPESVIQHLGYLFLKMSPEDIRKWNVTSLETLKALLEVNKGHEMSPQVATLIDRFVKGRGQLDKDTLDTLTAFYPGYLCSLSPEELSSVPPSSIWAVRPQDLDTCDPRQLDVLYPKARLAFQNMNGSEYFVKIQSFLGGAPTEDLKALSQQNVSMDLATFMKLRTDAVLPLTVAEVQKLLGPHVEGLKAEERHRPVRDWILRQRQDDLDTLGLGLQGGIPNGYLVLDLSMQEALSGTPCLLGPGPVLTVLALLLASTLA

SEQ ID NO: 3 - protein, 1132 aa, Homo sapiens
MPRAPRCRAVRSLLRSHYREVLPLATFVRRLGPQGWRLVQRGDPAAFRALVAQCLVCVPWDARPPPAAPSFRQVSCLKELVARVLQRLCERGAKNVLAFGFALLDGARGGPPEAFTTSVRSYLPNTVTDALRGSGAWGLLLRRVGDDVLVHLLARCALFVLVAPSCAYQVCGPPLYQLGAATQARPPPHASGPRRRLGCERAWNHSVREAGVPLGLPAPGARRRGGSASRSLPLPKRPRRGAAPEPERTPVGQGSWAHPGRTRGPSDRGFCVVSPARPAEEATSLEGALSGTRHSHPSVGRQHHAGPPSTSRPPRPWDTPCPPVYAETKHFLYSSGDKEQLRPSFLLSSLRPSLTGARRLVETIFLGSRPWMPGTPRRLPRLPQRYWQMRPLFLELLGNHAQCPYGVLLKTHCPLRAAVTPAAGVCAREKPQGSVAAPEEEDTDPRRLVQLLRQHSSPWQVYGFVRACLRRLVPPGLWGSRHNERRFLRNTKKFISLGKHAKLSLQELTWKMSVRDCAWLRRSPGVGCVPAAEHRLREEILAKFLHWLMSVYVVELLRSFFYVTETTFQKNRLFFYRKSVWSKLQSIGIRQHLKRVQLRELSEAEVRQHREARPALLTSRLRFIPKPDGLRPIVNMDYVVGARTFRREKRAERLTSRVKALFSVLNYERARRPGLLGASVLGLDDIHRAWRTFVLRVRAQDPPPELYFVKVDVTGAYDTIPQDRLTEVIASIIKPQNTYCVRRYAVVQKAAHGHVRKAFKSHVSTLTDLQPYMRQFVAHLQETSPLRDAVVIEQSSSLNEASSGLFDVFLRFMCHHAVRIRGKSYVQCQGIPQGSILSTLLCSLCYGDMENKLFAGIRRDGLLLRLVDDFLLVTPHLTHAKTFLRTLVRGVPEYGCVVNLRKTVVNFPVEDEALGGTAFVQMPAHGLFPWCGLLLDTRTLEVQSDYSSYARTSIRASLTFNRGFKAGRNMRRKLFGVLRLKCHSLFLDLQVNSLQTVCTNIYKILLLQAYRFHACVLQLPFHQQVWKNPTFFLRVISDTASLCYSILKAKNAGMSLGAKGAAGPLPSEAVQWLCHQAFLLKLTRHRVTYVPLLGSLRTAQTQLSRKLPGTTLTALEAAANPALPSDFKTILD

SEQ ID NO: 4 - DNA, 30252 bp, Artificial Sequence
  Synthetic Construct
ccatcttcaataatatacctcaaactttttgtgcgcgttaatatgcaaatgaggcgtttgaatttggggaggaagggcggtgattggtcgagggatgagcgaccgttaggggcggggcgagtgacgttttgatgacgtggttgcgaggaggagccagtttgcaagttctcgtgggaaaagtgacgtcaaacgaggtgtggtttgaacacggaaatactcaattttcccgcgctctctgacaggaaatgaggtgtttctgggcggatgcaagtgaaaacgggccattttcgcgcgaaaactgaatgaggaagtgaaaatctgagtaatttcgcgtttatggcagggaggagtatttgccgagggccgagtagactttgaccgattacgtgggggtttcgattaccgtgtttttcacctaaatttccgcgtacggtgtcaaagtccggtgtttttactactgtaatagtaatcaattacggggtcattagttcatagcccatatatggagttccgcgttacataacttacggtaaatggcccgcctggctgaccgcccaacgacccccgcccattgacgtcaataatgacgtatgttcccatagtaacgccaatagggactttccattgacgtcaatgggtggagtatttacggtaaactgcccacttggcagtacatcaagtgtatcatatgccaagtacgccccctattgacgtcaatgacggtaaatggcccgcctggcattatgcccagtacatgaccttatgggactttcctacttggcagtacatctacgtattagtcatcgctattaccatggtgatgcggttttggcagtacatcaatgggcgtggatagcggtttgactcacggggatttccaagtctccaccccattgacgtcaatgggagtttgttttggcaccaaaatcaacgggactttccaaaatgtcgtaacaactccgccccattgacgcaaatgggcggtaggcgtgtacggtgggaggtctatataagcagagctgtccctatcagtgatagagatctccctatcagtgatagagagtttagtgaaccgtcagatccgctagggtaccgcgatcgcacctcgagctgatcataatcagccataccacatttgtagaggttttacttgctttaaaaaacctcccacacctccccctgaacctgaaacataaaatgaatgcaattgttgttgttaacttgtttattgcagcttataatggttacaaataaagcaatagcatcacaaatttcacaaataaagcatttttttcactgcattctagttgtggtttgtccaaactcatcaatgtatcttaccaggtgccgagcctgcgagtgcggagggaagcatgccaggttccagcccgtgtgtgtggatgtgacggaggacctgcgacccgatcatttggtgttgccctgcaccgggacggagttcggttccagcggggaagaatctgactagagtgagtagtgttctggggcgggggaggacctgcatgagggccagaataactgaaatctgtgcttttctgtgtgttgcagcagcatgagcggaagcggctcctttgagggaggggtattcagcccttatctgacggggcgtctcccctcctgggcgggagtgcgtcagaatgtgatgggatccacggtggacggccggcccgtgcagcccgcgaactcttcaaccctgacctatgcaaccctgagctcttcgtcgttggacgcagctgccgccgcagctgctgcatctgccgccagcgccgtgcgcggaatggccatgggcgccggctactacggcactctggtggccaactcgagttccaccaataatcccgccagcctgaacgaggagaagctgttgctgctgatggcccagctcgaggccttgacccagcgcctgggcgagctgacccagcaggtggctcagctgcaggagcagacgcgggccgcggttgccacggtgaaatccaaataaaaaatgaatcaataaataaacggagacggttgttgattttaacacagagtctgaatctttatttgatttttcgcgcgcggtaggccctggaccaccggtctcgatcattgagcacccggtggatcttttccaggacccggtagaggtgggcttggatgttgaggtacatgggcatgagcccgtcccgggggtggaggtagctccattgcagggcctcgtgctcgggggtggtgttgtaaatcacccagtcatagcaggggcgcagggcatggtgttgcacaatatctttgaggaggagactgatggccacgggcagccctttggtgtaggtgtttacaaatctgttgagctgggagggatgcatgcggggggagatgaggtgcatcttggcctggatcttgagattggcgatgttaccgcccagatcccgcctggggttcatgttgtgcaggaccaccagcacggtgtatccggtgcacttggggaatttatcatgcaacttggaagggaaggcgtgaaagaatttggcgacgcctttgtgcccgcccaggttttccatgcactcatccatgatgatggcgatgggcccgtgggcggcggcctgggcaaagacgtttcgggggtcggacacatcatagttgtggtcctgggtgaggtcatcataggccattttaatgaatttggggcggagggtgccggactgggggacaaaggtaccctcgatcccgggggcgtagttcccctcacagatctgcatctcccaggctttgagctcggagggggggatcatgtccacctgcggggcgataaagaacacggtttccggggcgggggagatgagctgggccgaaagcaagttccggagcagctgggacttgccgcagccggtggggccgtagatgaccccgatgaccggctgcaggtggtagttgagggagagacagctgccgtcctcccggaggaggggggccacctcgttcatcatctcgcgcacgtgcatgttctcgcgcaccagttccgccaggaggcgctctccccccagggataggagctcctggagcgaggcgaagtttttcagcggcttgagtccgtcggccatgggcattttggagagggtttgttgcaagagttccaggcggtcccagagctcggtgatgtgctctacggcatctcgatccagcagacctcctcgtttcgcgggttgggacggctgcgggagtagggcaccagacgatgggcgtccagcgcagccagggtccggtccttccagggtcgcagcgtccgcgtcagggtggtctccgtcacggtgaaggggtgcgcgccgggctgggcgcttgcgagggtgcgcttcaggctcatccggctggtcgaaaaccgctcccgatcggcgccctgcgcgtcggccaggtagcaattgaccatgagttcgtagttgagcgcctcggccgcgtggcctttggcgcggagcttacctttggaagtctgcccgcaggcgggacagaggagggacttgagggcgtagagcttgggggcgaggaagacggactcgggggcgtaggcgtccgcgccgcagtgggcgcagacggtctcgcactccacgagccaggtgaggtcgggctggtcggggtcaaaaaccagtttcccgccgttctttttgatgcgtttcttacctttggtctccatgagctcgtgtccccgctgggtgacaaagaggctgtccgtgtccccgtagaccgactttatgggccggtcctcgagcggtgtgccgcggtcctcctcgtagaggaaccccgcccactccgagacgaaagcccgggtccaggccagcacgaaggaggccacgtgggacgggtagcggtcgttgtccaccagcgggtccaccttttccagggtatgcaaacacatgtccccctcgtccacatccaggaaggtgattggcttgtaagtgtaggccacgtgaccgggggtcccggccgggggggtataaaagggtgcgggtccctgctcgtcctcactgtcttccggatcgctgtccaggagcgccagctgttggggtaggtattccctctcgaaggcgggcatgacctcggcactcaggttgtcagtttctagaaacgaggaggatttgatattgacggtgccggcggagatgcctttcaagagcccctcgtccatctggtcagaaaagacgatctttttgttgtcgagcttggtggcgaaggagccgtagagggcgttggagaggagcttggcgatggagcgcatggtctggtttttttccttgtcggcgcgctccttggcggcgatgttgagctgcacgtactcgcgcgccacgcacttccattcggggaagacggtggtcagctcgtcgggcacgattctgacctgccagccccgattatgcagggtgatgaggtccacactggtggccacctcgccgcgcaggggctcattagtccagcagaggcgtccgcccttgcgcgagcagaaggggggcagggggtccagcatgacctcgtcgggggggtcggcatcgatggtgaagatgccgggcaggaggtcggggtcaaagtagctgatggaagtggccagatcgtccagggcagcttgccattcgcgcacggccagcgcgcgctcgtagggactgaggggcgtgccccagggcatgggatgggtaagcgcggaggcgtacatgccgcagatgtcgtagacgtagaggggctcctcgaggatgccgatgtaggtggggtagcagcgccccccgcggatgctggcgcgcacgtagtcatacagctcgtgcgagggggcgaggagccccgggcccaggttggtgcgactgggcttttcggcgcggtagacgatctggcggaaaatggcatgcgagttggaggagatggtgggcctttggaagatgttgaagtgggcgtggggcagtccgaccgagtcgcggatgaagtgggcgtaggagtcttgcagcttggcgacgagctcggcggtgactaggacgtccagagcgcagtagtcgagggtctcctggatgatgtcatacttgagctgtcccttttgtttccacagctcgcggttgagaaggaactcttcgcggtccttccagtactcttcgagggggaacccgtcctgatctgcacggtaagagcctagcatgtagaactggttgacggccttgtaggcgcagcagcccttctccacggggagggcgtaggcctgggcggccttgcgcagggaggtgtgcgtgagggcgaaagtgtccctgaccatgaccttgaggaactggtgcttgaagtcgatatcgtcgcagcccccctgctcccagagctggaagtccgtgcgcttcttgtaggcggggttgggcaaagcgaaagtaacatcgttgaagaggatcttgcccgcgcggggcataaagttgcgagtgatgcggaaaggttggggcacctcggcccggttgttgatgacctgggcggcgagcacgatctcgtcgaagccgttgatgttgtggcccacgatgtagagttccacgaatcgcggacggcccttgacgtggggcagtttcttgagctcctcgtaggtgagctcgtcggggtcgctgagcccgtgctgctcgagcgcccagtcggcgagatgggggttggcgcggaggaaggaagtccagagatccacggccagggcggtttgcagacggtcccggtactgacggaactgctgcccgacggccattttttcgggggtgacgcagtagaaggtgcgggggtccccgtgccagcgatcccatttgagctggagggcgagatcgagggcgagctcgacgagccggtcgtccccggagagtttcatgaccagcatgaaggggacgagctgcttgccgaaggaccccatccaggtgtaggtttccacatcgtaggtgaggaagagcctttcggtgcgaggatgcgagccgatggggaagaactggatctcctgccaccaattggaggaatggctgttgatgtgatggaagtagaaatgccgacggcgcgccgaacactcgtgcttgtgtttatacaagcggccacagtgctcgcaacgctgcacgggatgcacgtgctgcacgagctgtacctgagttcctttgacgaggaatttcagtgggaagtggagtcgtggcgcctgcatctcgtgctgtactacgtcgtggtggtcggcctggccctcttctgcctcgatggtggtcatgctgacgagcccgcgcgggaggcaggtccagacctcggcgcgagcgggtcggagagcgaggacgagggcgcgcaggccggagctgtccagggtcctgagacgctgcggagtcaggtcagtgggcagcggcggcgcgcggttgacttgcaggagtttttccagggcgcgcgggaggtccagatggtacttgatctccaccgcgccattggtggcgacgtcgatggcttgcagggtcccgtgcccctggggtgtgaccaccgtcccccgtttcttcttgggcggctggggcgacgggggcggtgcctcttccatggttagaagcggcggcgaggacgcgcgccgggcggcaggggcggctcggggcccggaggcaggggcggcaggggcacgtcggcgccgcgcgcgggtaggttctggtactgcgcccggagaagactggcgtgagcgacgacgcgacggttgacgtcctggatctgacgcctctgggtgaaggccacgggacccgtgagtttgaacctgaaagagagttcgacagaatcaatctcggtatcgttgacggcggcctgccgcaggatctcttgcacgtcgcccgagttgtcctggtaggcgatctcggtcatgaactgctcgatctcctcctcttgaaggtctccgcggccggcgcgctccacggtggccgcgaggtcgttggagatgcggcccatgagctgcgagaaggcgttcatgcccgcctcgttccagacgcggctgtagaccacgacgccctcgggatcgcgggcgcgcatgaccacctgggcgaggttgagctccacgtggcgcgtgaagaccgcgtagttgcagaggcgctggtagaggtagttgagcgtggtggcgatgtgctcggtgacgaagaaatacatgatccagcggcggagcggcatctcgctgacgtcgcccagcgcctccaaacgttccatggcctcgtaaaagtccacggcgaagttgaaaaactgggagttgcgcgccgagacggtcaactcctcctccagaagacggatgagctcggcgatggtggcgcgcacctcgcgctcgaaggcccccgggagttcctccacttcctcttcttcctcctccactaacatctcttctacttcctcctcaggcggcagtggtggcgggggagggggcctgcgtcgccggcggcgcacgggcagacggtcgatgaagcgctcgatggtctcgccgcgccggcgtcgcatggtctcggtgacggcgcgcccgtcctcgcggggccgcagcgtgaagacgccgccgcgcatctccaggtggccgggggggtccccgttgggcagggagagggcgctgacgatgcatcttatcaattgccccgtagggactccgcgcaaggacctgagcgtctcgagatccacgggatctgaaaaccgctgaacgaaggcttcgagccagtcgcagtcgcaaggtaggctgagcacggtttcttctggcgggtcatgttggttgggagcggggcgggcgatgctgctggtgatgaagttgaaataggcggttctgagacggcggatggtggcgaggagcaccaggtctttgggcccggcttgctggatgcgcagacggtcggccatgccccaggcgtggtcctgacacctggccaggtccttgtagtagtcctgcatgagccgctccacgggcacctcctcctcgcccgcgcggccgtgcatgcgcgtgagcccgaagccgcgctggggctggacgagcgccaggtcggcgacgacgcgctcggcgaggatggcttgctggatctgggtgagggtggtctggaagtcatcaaagtcgacgaagcggtggtaggctccggtgttgatggtgtaggagcagttggccatgacggaccagttgacggtctggtggcccggacgcacgagctcgtggtacttgaggcgcgagtaggcgcgcgtgtcgaagatgtagtcgttgcaggtgcgcaccaggtactggtagccgatgaggaagtgcggcggcggctggcggtagagcggccatcgctcggtggcgggggcgccgggcgcgaggtcctcgagcatggtgcggtggtagccgtagatgtacctggacatccaggtgatgccggcggcggtggtggaggcgcgcgggaactcgcggacgcggttccagatgttgcgcagcggcaggaagtagttcatggtgggcacggtctggcccgtgaggcgcgcgcagtcgtggatgctctatacgggcaaaaacgaaagcggtcagcggctcgactccgtggcctggaggctaagcgaacgggttgggctgcgcgtgtaccccggttcgaatctcgaatcaggctggagccgcagctaacgtggtattggcactcccgtctcgacccaagcctgcaccaaccctccaggatacggaggcgggtcgttttgcaacttttttttggaggccggatgagactagtaagcgcggaaagcggccgaccgcgatggctcgctgccgtagtctggagaagaatcgccagggttgcgttgcggtgtgccccggttcgaggccggccggattccgcggctaacgagggcgtggctgccccgtcgtttccaagaccccatagccagccgacttctccagttacggagcgagcccctcttttgttttgtttgtttttgccagatgcatcccgtactgcggcagatgcgcccccaccaccctccaccgcaacaacagccccctccacagccggcgcttctgcccccgccccagcagcaacttccagccacgaccgccgcggccgccgtgagcggggctggacagagttatgatcaccagctggccttggaagagggcgaggggctggcgcgcctgggggcgtcgtcgccggagcggcacccgcgcgtgcagatgaaaagggacgctcgcgaggcctacgtgcccaagcagaacctgttcagagacaggagcggcgaggagcccgaggagatgcgcgcggcccggttccacgcggggcgggagctgcggcgcggcctggaccgaaagagggtgctgagggacgaggatttcgaggcggacgagctgacggggatcagccccgcgcgcgcgcacgtggccgcggccaacctggtcacggcgtacgagcagaccgtgaaggaggagagcaacttccaaaaatccttcaacaaccacgtgcgcaccctgatcgcgcgcgaggaggtgaccctgggcctgatgcacctgtgggacctgctggaggccatcgtgcagaaccccaccagcaagccgctgacggcgcagctgttcctggtggtgcagcatagtcgggacaacgaagcgttcagggaggcgctgctgaatatcaccgagcccgagggccgctggctcctggacctggtgaacattctgcagagcatcgtggtgcaggagcgcgggctgccgctgtccgagaagctggcggccatcaacttctcggtgctgagtttgggcaagtactacgctaggaagatctacaagaccccgtacgtgcccatagacaaggaggtgaagatcgacgggttttacatgcgcatgaccctgaaagtgctgaccctgagcgacgatctgggggtgtaccgcaacgacaggatgcaccgtgcggtgagcgccagcaggcggcgcgagctgagcgaccaggagctgatgcatagtctgcagcgggccctgaccggggccgggaccgagggggagagctactttgacatgggcgcggacctgcactggcagcccagccgccgggccttggaggcggcggcaggaccctacgtagaagaggtggacgatgaggtggacgaggagggcgagtacctggaagactgatggcgcgaccgtatttttgctagatgcaacaacaacagccacctcctgatcccgcgatgcgggcggcgctgcagagccagccgtccggcattaactcctcggacgattggacccaggccatgcaacgcatcatggcgctgacgacccgcaaccccgaagcctttagacagcagccccaggccaaccggctctcggccatcctggaggccgtggtgccctcgcgctccaaccccacgcacgagaaggtcctggccatcgtgaacgcgctggtggagaacaaggccatccgcggcgacgaggccggcctggtgtacaacgcgctgctggagcgcgtggcccgctacaacagcaccaacgtgcagaccaacctggaccgcatggtgaccgacgtgcgcgaggccgtggcccagcgcgagcggttccaccgcgagtccaacctgggatccatggtggcgctgaacgccttcctcagcacccagcccgccaacgtgccccggggccaggaggactacaccaacttcatcagcgccctgcgcctgatggtgaccgaggtgccccagagcgaggtgtaccagtccgggccggactacttcttccagaccagtcgccagggcttgcagaccgtgaacctgagccaggctttcaagaacttgcagggcctgtggggcgtgcaggccccggtcggggaccgcgcgacggtgtcgagcctgctgacgccgaactcgcgcctgctgctgctgctggtggcccccttcacggacagcggcagcatcaaccgcaactcgtacctgggctacctgattaacctgtaccgcgaggccatcggccaggcgcacgtggacgagcagacctaccaggagatcacccacgtgagccgcgccctgggccaggacgacccgggcaacctggaagccaccctgaactttttgctgaccaaccggtcgcagaagatcccgccccagtacgcgctcagcaccgaggaggagcgcatcctgcgttacgtgcagcagagcgtgggcctgttcctgatgcaggagggggccacccccagcgccgcgctcgacatgaccgcgcgcaacatggagcccagcatgtacgccagcaaccgcccgttcatcaataaactgatggactacttgcatcgggcggccgccatgaactctgactatttcaccaacgccatcctgaatccccactggctcccgccgccggggttctacacgggcgagtacgacatgcccgaccccaatgacgggttcctgtgggacgatgtggacagcagcgtgttctccccccgaccgggtgctaacgagcgccccttgtggaagaaggaaggcagcgaccgacgcccgtcctcggcgctgtccggccgcgagggtgctgccgcggcggtgcccgaggccgccagtcctttcccgagcttgcccttctcgctgaacagtatccgcagcagcgagctgggcaggatcacgcgcccgcgcttgctgggcgaagaggagtacttgaatgactcgctgttgagacccgagcgggagaagaacttccccaataacgggatagaaagcctggtggacaagatgagccgctggaagacgtatgcgcaggagcacagggacgatccccgggcgtcgcagggggccacgagccggggcagcgccgcccgtaaacgccggtggcacgacaggcagcggggacagatgtgggacgatgaggactccgccgacgacagcagcgtgttggacttgggtgggagtggtaacccgttcgctcacctgcgcccccgtatcgggcgcatgatgtaagagaaaccgaaaataaatgatactcaccaaggccatggcgaccagcgtgcgttcgtttcttctctgttgttgttgtatctagtatgatgaggcgtgcgtacccggagggtcctcctccctcgtacgagagcgtgatgcagcaggcgatggcggcggcggcgatgcagcccccgctggaggctccttacgtgcccccgcggtacctggcgcctacggaggggcggaacagcattcgttactcggagctggcacccttgtacgataccacccggttgtacctggtggacaacaagtcggcggacatcgcctcgctgaactaccagaacgaccacagcaacttcctgaccaccgtggtgcagaacaatgacttcacccccacggaggccagcacccagaccatcaactttgacgagcgctcgcggtggggcggccagctgaaaaccatcatgcacaccaacatgcccaacgtgaacgagttcatgtacagcaacaagttcaaggcgcgggtgatggtctcccgcaagacccccaatggggtgacagtgacagaggattatgatggtagtcaggatgagctgaagtatgaatgggtggaatttgagctgcccgaaggcaacttctcggtgaccatgaccatcgacctgatgaacaacgccatcatcgacaattacttggcggtggggcggcagaacggggtgctggagagcgacatcggcgtgaagttcgacactaggaacttcaggctgggctgggaccccgtgaccgagctggtcatgcccggggtgtacaccaacgaggctttccatcccgatattgtcttgctgcccggctgcggggtggacttcaccgagagccgcctcagcaacctgctgggcattcgcaagaggcagcccttccaggaaggcttccagatcatgtacgaggatctggaggggggcaacatccccgcgctcctggatgtcgacgcctatgagaaaagcaaggaggatgcagcagctgaagcaactgcagccgtagctaccgcctctaccgaggtcaggggcgataattttgcaagcgccgcagcagtggcagcggccgaggcggctgaaaccgaaagtaagatagtcattcagccggtggagaaggatagcaagaacaggagctacaacgtactaccggacaagataaacaccgcctaccgcagctggtacctagcctacaactatggcgaccccgagaagggcgtgcgctcctggacgctgctcaccacctcggacgtcacctgcggcgtggagcaagtctactggtcgctgcccgacatgatgcaagacccggtcaccttccgctccacgcgtcaagttagcaactacccggtggtgggcgccgagctcctgcccgtctactccaagagcttcttcaacgagcaggccgtctactcgcagcagctgcgcgccttcacctcgcttacgcacgtcttcaaccgcttccccgagaaccagatcctcgtccgcccgcccgcgcccaccattaccaccgtcagtgaaaacgttcctgctctcacagatcacgggaccctgccgctgcgcagcagtatccggggagtccagcgcgtgaccgttactgacgccagacgccgcacctgcccctacgtctacaaggccctgggcatagtcgcgccgcgcgtcctctcgagccgcaccttctaaatgtccattctcatctcgcccagtaataacaccggttggggcctgcgcgcgcccagcaagatgtacggaggcgctcgccaacgctccacgcaacaccccgtgcgcgtgcgcgggcacttccgcgctccctggggcgccctcaagggccgcgtgcggtcgcgcaccaccgtcgacgacgtgatcgaccaggtggtggccgacgcgcgcaactacacccccgccgccgcgcccgtctccaccgtggacgccgtcatcgacagcgtggtggccgacgcgcgccggtacgcccgcgccaagagccggcggcggcgcatcgcccggcggcaccggagcacccccgccatgcgcgcggcgcgagccttgctgcgcagggccaggcgcacgggacgcagggccatgctcagggcggccagacgcgcggcttcaggcgccagcgccggcaggacccggagacgcgcggccacggcggcggcagcggccatcgccagcatgtcccgcccgcggcgagggaacgtgtactgggtgcgcgacgccgccaccggtgtgcgcgtgcccgtgcgcacccgcccccctcgcacttgaagatgttcacttcgcgatgttgatgtgtcccagcggcgaggaggatgtccaagcgcaaattcaaggaagagatgctccaggtcatcgcgcctgagatctacggccctgcggtggtgaaggaggaaagaaagccccgcaaaatcaagcgggtcaaaaaggacaaaaaggaagaagaaagtgatgtggacggattggtggagtttgtgcgcgagttcgccccccggcggcgcgtgcagtggcgcgggcggaaggtgcaaccggtgctgagacccggcaccaccgtggtcttcacgcccggcgagcgctccggcaccgcttccaagcgctcctacgacgaggtgtacggggatgatgatattctggagcaggcggccgagcgcctgggcgagtttgcttacggcaagcgcagccgttccgcaccgaaggaagaggcggtgtccatcccgctggaccacggcaaccccacgccgagcctcaagcccgtgaccttgcagcaggtgctgccgaccgcggcgccgcgccgggggttcaagcgcgagggcgaggatctgtaccccaccatgcagctgatggtgcccaagcgccagaagctggaagacgtgctggagaccatgaaggtggacccggacgtgcagcccgaggtcaaggtgcggcccatcaagcaggtggccccgggcctgggcgtgcagaccgtggacatcaagattcccacggagcccatggaaacgcagaccgagcccatgatcaagcccagcaccagcaccatggaggtgcagacggatccctggatgccatcggctcctagtcgaagaccccggcgcaagtacggcgcggccagcctgctgatgcccaactacgcgctgcatccttccatcatccccacgccgggctaccgcggcacgcgcttctaccgcggtcataccagcagccgccgccgcaagaccaccactcgccgccgccgtcgccgcaccgccgctgcaaccacccctgccgccctggtgcggagagtgtaccgccgcggccgcgcacctctgaccctgccgcgcgcgcgctaccacccgagcatcgccatttaaactttcgcctgctttgcagatcaatggccctcacatgccgccttcgcgttcccattacgggctaccgaggaagaaaaccgcgccgtagaaggctggcggggaacgggatgcgtcgccaccaccaccggcggcggcgcgccatcagcaagcggttggggggaggcttcctgcccgcgctgatccccatcatcgccgcggcgatcggggcgatccccggcattgcttccgtggcggtgcaggcctctcagcgccactgagacacacttggaaacatcttgtaataaaccaatggactctgacgctcctggtcctgtgatgtgttttcgtagacagatggaagacatcaatttttcgtccctggctccgcgacacggcacgcggccgttcatgggcacctggagcgacatcggcaccagccaactgaacgggggcgccttcaattggagcagtctctggagcgggcttaagaatttcgggtccacgcttaaaacctatggcagcaaggcgtggaacagcaccacagggcaggcgctgagggataagctgaaagagcagaacttccagcagaaggtggtcgatgggctcgcctcgggcatcaacggggtggtggacctggccaaccaggccgtgcagcggcagatcaacagccgcctggacccggtgccgcccgccggctccgtggagatgccgcaggtggaggaggagctgcctcccctggacaagcggggcgagaagcgaccccgccccgatgcggaggagacgctgctgacgcacacggacgagccgcccccgtacgaggaggcggtgaaactgggtctgcccaccacgcggcccatcgcgcccctggccaccggggtgctgaaacccgaaaagcccgcgaccctggacttgcctcctccccagccttcccgcccctctacagtggctaagcccctgccgccggtggccgtggcccgcgcgcgacccgggggcaccgcccgccctcatgcgaactggcagagcactctgaacagcatcgtgggtctgggagtgcagagtgtgaagcgccgccgctgctattaaacctaccgtagcgcttaacttgcttgtctgtgtgtgtatgtattatgtcgccgccgccgctgtccaccagaaggaggagtgaagaggcgcgtcgccgagttgcaagatggccaccccatcgatgctgccccagtgggcgtacatgcacatcgccggacaggacgcttcggagtacctgagtccgggtctggtgcagtttgcccgcgccacagacacctacttcagtctggggaacaagtttaggaaccccacggtggcgcccacgcacgatgtgaccaccgaccgcagccagcggctgacgctgcgcttcgtgcccgtggaccgcgaggacaacacctactcgtacaaagtgcgctacacgctggccgtgggcgacaaccgcgtgctggacatggccagcacctactttgacatccgcggcgtgctggatcggggccctagcttcaaaccctactccggcaccgcctacaacagtctggcccccaagggagcacccaacacttgtcagtggacatataaagccgatggtgaaactgccacagaaaaaacctatacatatggaaatgcacccgtgcagggcattaacatcacaaaagatggtattcaacttggaactgacaccgatgatcagccaatctacgcagataaaacctatcagcctgaacctcaagtgggtgatgctgaatggcatgacatcactggtactgatgaaaagtatggaggcagagctcttaagcctgataccaaaatgaagccttgttatggttcttttgccaagcctactaataaagaaggaggtcaggcaaatgtgaaaacaggaacaggcactactaaagaatatgacatagacatggctttctttgacaacagaagtgcggctgctgctggcctagctccagaaattgttttgtatactgaaaatgtggatttggaaactccagatacccatattgtatacaaagcaggcacagatgacagcagctcttctattaatttgggtcagcaagccatgcccaacagacctaactacattggtttcagagacaactttatcgggctcatgtactacaacagcactggcaatatgggggtgctggccggtcaggcttctcagctgaatgctgtggttgacttgcaagacagaaacaccgagctgtcctaccagctcttgcttgactctctgggtgacagaacccggtatttcagtatgtggaatcaggcggtggacagctatgatcctgatgtgcgcattattgaaaatcatggtgtggaggatgaacttcccaactattgtttccctctggatgctgttggcagaacagatacttatcagggaattaaggctaatggaactgatcaaaccacatggaccaaagatgacagtgtcaatgatgctaatgagataggcaagggtaatccattcgccatggaaatcaacatccaagccaacctgtggaggaacttcctctacgccaacgtggccctgtacctgcccgactcttacaagtacacgccggccaatgttaccctgcccaccaacaccaacacctacgattacatgaacggccgggtggtggcgccctcgctggtggactcctacatcaacatcggggcgcgctggtcgctggatcccatggacaacgtgaaccccttcaaccaccaccgcaatgcggggctgcgctaccgctccatgctcctgggcaacgggcgctacgtgcccttccacatccaggtgccccagaaatttttcgccatcaagagcctcctgctcctgcccgggtcctacacctacgagtggaacttccgcaaggacgtcaacatgatcctgcagagctccctcggcaacgacctgcgcacggacggggcctccatctccttcaccagcatcaacctctacgccaccttcttccccatggcgcacaacacggcctccacgctcgaggccatgctgcgcaacgacaccaacgaccagtccttcaacgactacctctcggcggccaacatgctctaccccatcccggccaacgccaccaacgtgcccatctccatcccctcgcgcaactgggccgccttccgcggctggtccttcacgcgtctcaagaccaaggagacgccctcgctgggctccgggttcgacccctacttcgtctactcgggctccatcccctacctcgacggcaccttctacctcaaccacaccttcaagaaggtctccatcaccttcgactcctccgtcagctggcccggcaacgaccggctcctgacgcccaacgagttcgaaatcaagcgcaccgtcgacggcgagggctacaacgtggcccagtgcaacatgaccaaggactggttcctggtccagatgctggcccactacaacatcggctaccagggcttctacgtgcccgagggctacaaggaccgcatgtactccttcttccgcaacttccagcccatgagccgccaggtggtggacgaggtcaactacaaggactaccaggccgtcaccctggcctaccagcacaacaactcgggcttcgtcggctacctcgcgcccaccatgcgccagggccagccctaccccgccaactacccctacccgctcatcggcaagagcgccgtcaccagcgtcacccagaaaaagttcctctgcgacagggtcatgtggcgcatccccttctccagcaacttcatgtccatgggcgcgctcaccgacctcggccagaacatgctctatgccaactccgcccacgcgctagacatgaatttcgaagtcgaccccatggatgagtccacccttctctatgttgtcttcgaagtcttcgacgtcgtccgagtgcaccagccccaccgcggcgtcatcgaggccgtctacctgcgcacccccttctcggccggtaacgccaccacctaagctcttgcttcttgcaagccatggccgcgggctccggcgagcaggagctcagggccatcatccgcgacctgggctgcgggccctacttcctgggcaccttcgataagcgcttcccgggattcatggccccgcacaagctggcctgcgccatcgtcaacacggccggccgcgagaccgggggcgagcactggctggccttcgcctggaacccgcgctcgaacacctgctacctcttcgaccccttcgggttctcggacgagcgcctcaagcagatctaccagttcgagtacgagggcctgctgcgccgcagcgccctggccaccgaggaccgctgcgtcaccctggaaaagtccacccagaccgtgcagggtccgcgctcggccgcctgcgggctcttctgctgcatgttcctgcacgccttcgtgcactggcccgaccgccccatggacaagaaccccaccatgaacttgctgacgggggtgcccaacggcatgctccagtcgccccaggtggaacccaccctgcgccgcaaccaggaggcgctctaccgcttcctcaactcccactccgcctactttcgctcccaccgcgcgcgcatcgagaaggccaccgccttcgaccgcatgaatcaagacatgtaaaccgtgtgtgtatgttaaatgtctttaataaacagcactttcatgttacacatgcatctgagatgatttatttagaaatcgaaagggttctgccgggtctcggcatggcccgcgggcagggacacgttgcggaactggtacttggccagccacttgaactcggggatcagcagtttgggcagcggggtgtcggggaaggagtcggtccacagcttccgcgtcagttgcagggcgcccagcaggtcgggcgcggagatcttgaaatcgcagttgggacccgcgttctgcgcgcgggagttgcggtacacggggttgcagcactggaacaccatcagggccgggtgcttcacgctcgccagcaccgtcgcgtcggtgatgctctccacgtcgaggtcctcggcgttggccatcccgaagggggtcatcttgcaggtctgccttcccatggtgggcacgcacccgggcttgtggttgcaatcgcagtgcagggggatcagcatcatctgggcctggtcggcgttcatccccgggtacatggccttcatgaaagcctccaattgcctgaacgcctgctgggccttggctccctcggtgaagaagaccccgcaggacttgctagagaactggttggtggcgcacccggcgtcgtgcacgcagcagcgcgcgtcgttgttggccagctgcaccacgctgcgcccccagcggttctgggtgatcttggcccggtcggggttctccttcagcgcgcgctgcccgttctcgctcgccacatccatctcgatcatgtgctccttctggatcatggtggtcccgtgcaggcaccgcagcttgccctcggcctcggtgcacccgtgcagccacagcgcgcacccggtgcactcccagttcttgtgggcgatctgggaatgcgcgtgcacgaagccctgcaggaagcggcccatcatggtggtcagggtcttgttgctagtgaaggtcagcggaatgccgcggtgctcctcgttgatgtacaggtggcagatgcggcggtacacctcgccctgctcgggcatcagctggaagttggctttcaggtcggtctccacgcggtagcggtccatcagcatagtcatgatttccatacccttctcccaggccgagacgatgggcaggctcatagggttcttcaccatcatcttagcgctagcagccgcggccagggggtcgctctcgtccagggtctcaaagctccgcttgccgtccttctcggtgatccgcaccggggggtagctgaagcccacggccgccagctcctcctcggcctgtctttcgtcctcgctgtcctggctgacgtcctgcaggaccacatgcttggtcttgcggggtttcttcttgggcggcagcggcggcggagatgttggagatggcgagggggagcgcgagttctcgctcaccactactatctcttcctcttcttggtccgaggccacgcggcggtaggtatgtctcttcgggggcagaggcggaggcgacgggctctcgccgccgcgacttggcggatggctggcagagccccttccgcgttcgggggtgcgctcccggcggcgctctgactgacttcctccgcggccggccattgtgttctcctagggaggaacaacaagcatggagactcagccatcgccaacctcgccatctgcccccaccgccgacgagaagcagcagcagcagaatgaaagcttaaccgccccgccgcccagccccgccacctccgacgcggccgtcccagacatgcaagagatggaggaatccatcgagattgacctgggctatgtgacgcccgcggagcacgaggaggagctggcagtgcgcttttcacaagaagagatacaccaagaacagccagagcaggaagcagagaatgagcagagtcaggctgggctcgagcatgacggcgactacctccacctgagcgggggggaggacgcgctcatcaagcatctggcccggcaggccaccatcgtcaaggatgcgctgctcgaccgcaccgaggtgcccctcagcgtggaggagctcagccgcgcctacgagttgaacctcttctcgccgcgcgtgccccccaagcgccagcccaatggcacctgcgagcccaacccgcgcctcaacttctacccggtcttcgcggtgcccgaggccctggccacctaccacatctttttcaagaaccaaaagatccccgtctcctgccgcgccaaccgcacccgcgccgacgcccttttcaacctgggtcccggcgcccgcctacctgatatcgcctccttggaagaggttcccaagatcttcgagggtctgggcagcgacgagactcgggccgcgaacgctctgcaaggagaaggaggagagcatgagcaccacagcgccctggtcgagttggaaggcgacaacgcgcggctggcggtgctcaaacgcacggtcgagctgacccatttcgcctacccggctctgaacctgccccccaaagtcatgagcgcggtcatggaccaggtgctcatcaagcgcgcgtcgcccatctccgaggacgagggcatgcaagactccgaggagggcaagcccgtggtcagcgacgagcagctggcccggtggctgggtcctaatgctagtccccagagtttggaagagcggcgcaaactcatgatggccgtggtcctggtgaccgtggagctggagtgcctgcgccgcttcttcgccgacgcggagaccctgcgcaaggtcgaggagaacctgcactacctcttcaggcacgggttcgtgcgccaggcctgcaagatctccaacgtggagctgaccaacctggtctcctacatgggcatcttgcacgagaaccgcctggggcagaacgtgctgcacaccaccctgcgcggggaggcccggcgcgactacatccgcgactgcgtctacctctacctctgccacacctggcagacgggcatgggcgtgtggcagcagtgtctggaggagcagaacctgaaagagctctgcaagctcctgcagaagaacctcaagggtctgtggaccgggttcgacgagcgcaccaccgcctcggacctggccgacctcattttccccgagcgcctcaggctgacgctgcgcaacggcctgcccgactttatgagccaaagcatgttgcaaaactttcgctctttcatcctcgaacgctccggaatcctgcccgccacctgctccgcgctgccctcggacttcgtgccgctgaccttccgcgagtgccccccgccgctgtggagccactgctacctgctgcgcctggccaactacctggcctaccactcggacgtgatcgaggacgtcagcggcgagggcctgctcgagtgccactgccgctgcaacctctgcacgccgcaccgctccctggcctgcaacccccagctgctgagcgagacccagatcatcggcaccttcgagttgcaagggcccagcgaaggcgagggttcagccgccaaggggggtctgaaactcaccccggggctgtggacctcggcctacttgcgcaagttcgtgcccgaggactaccatcccttcgagatcaggttctacgaggaccaatcccatccgcccaaggccgagctgtcggcctgcgtcatcacccagggggcgatcctggcccaattgcaagccatccagaaatcccgccaagaattcttgctgaaaaagggccgcggggtctacctcgacccccagaccggtgaggagctcaaccccggcttcccccaggatgccccgaggaaacaagaagctgaaagtggagctgccgcccgtggaggatttggaggaagactgggagaacagcagtcaggcagaggaggaggagatggaggaagactgggacagcactcaggcagaggaggacagcctgcaagacagtctggaggaagacgaggaggaggcagaggaggaggtggaagaagcagccgccgccagaccgtcgtcctcggcgggggagaaagcaagcagcacggataccatctccgctccgggtcggggtcccgctcgaccacacagtagatgggacgagaccggacgattcccgaaccccaccacccagaccggtaagaaggagcggcagggatacaagtcctggcgggggcacaaaaacgccatcgtctcctgcttgcaggcctgcgggggcaacatctccttcacccggcgctacctgctcttccaccgcggggtgaactttccccgcaacatcttgcattactaccgtcacctccacagcccctactacttccaagaagaggcagcagcagcagaaaaagaccagcagaaaaccagcagctagaaaatccacagcggcggcagcaggtggactgaggatcgcggcgaacgagccggcgcaaacccgggagctgaggaaccggatctttcccaccctctatgccatcttccagcagagtcgggggcaggagcaggaactgaaagtcaagaaccgttctctgcgctcgctcacccgcagttgtctgtatcacaagagcgaagaccaacttcagcgcactctcgaggacgccgaggctctcttcaacaagtactgcgcgctcactcttaaagagtagcccgcgcccgcccagtcgcagaaaaaggcgggaattacgtcacctgtgcccttcgccctagccgcctccacccatcatcatgagcaaagagattcccacgccttacatgtggagctaccagccccagatgggcctggccgccggtgccgcccaggactactccacccgcatgaattggctcagcgccgggcccgcgatgatctcacgggtgaatgacatccgcgcccaccgaaaccagatactcctagaacagtcagcgctcaccgccacgccccgcaatcacctcaatccgcgtaattggcccgccgccctggtgtaccaggaaattccccagcccacgaccgtactacttccgcgagacgcccaggccgaagtccagctgactaactcaggtgtccagctggcgggcggcgccaccctgtgtcgtcaccgccccgctcagggtataaagcggctggtgatccggggcagaggcacacagctcaacgacgaggtggtgagctcttcgctgggtctgcgacctgacggagtcttccaactcgccggatcggggagatcttccttcacgcctcgtcaggccgtcctgactttggagagttcgtcctcgcagccccgctcgggtggcatcggcactctccagttcgtggaggagttcactccctcggtctacttcaaccccttctccggctcccccggccactacccggacgagttcatcccgaacttcgacgccatcagcgagtcggtggacggctacgattgaatgtcccatggtggcgcagctgacctagctcggcttcgacacctggaccactgccgccgcttccgctgcttcgctcgggatctcgccgagtttgcctactttgagctgcccgaggagcaccctcagggcccggcccacggagtgcggatcgtcgtcgaagggggcctcgactcccacctgcttcggatcttcagccagcgtccgatcctggtcgagcgcgagcaaggacagacccttctgactctgtactgcatctgcaaccaccccggcctgcatgaaagtctttgttgtctgctgtgtactgagtataataaaagctgagatcagcgactactccggacttccgtgtgtttaaactcacccccttatccagtgaaataaagatcatattgatgatgattttacagaaataaaaaataatcatttgatttgaaataaagatacaatcatattgatgatttgagtttaacaaaaaaataaagaatcacttacttgaaatctgataccaggtctctgtccatgttttctgccaacaccacttcactcccctcttcccagctctggtactgcaggccccggcgggctgcaaacttcctccacacgctgaaggggatgtcaaattcctcctgtccctcaatcttcattttatcttctatcagatgtccaaaaagcgcgtccgggtggatgatgacttcgaccccgtctacccctacgatgcagacaacgcaccgaccgtgcccttcatcaacccccccttcgtctcttcagatggattccaagagaagcccctgggggtgttgtccctgcgactggccgaccccgtcaccaccaagaacggggaaatcaccctcaagctgggagagggggtggacctcgattcctcgggaaaactcatctccaacacggccaccaaggccgccgcccctctcagtttttccaacaacaccatttcccttaacatggatcaccccttttacactaaagatggaaaattatccttacaagtttctccaccattaaatatactgagaacaagcattctaaacacactagctttaggttttggatcaggtttaggactccgtggctctgccttggcagtacagttagtctctccacttacatttgatactgatggaaacataaagcttaccttagacagaggtttgcatgttacaacaggagatgcaattgaaagcaacataagctgggctaaaggtttaaaatttgaagatggagccatagcaaccaacattggaaatgggttagagtttggaagcagtagtacagaaacaggtgttgatgatgcttacccaatccaagttaaacttggatctggccttagctttgacagtacaggagccataatggctggtaacaaagaagacgataaactcactttgtggacaacacctgatccatcaccaaactgtcaaatactcgcagaaaatgatgcaaaactaacactttgcttgactaaatgtggtagtcaaatactggccactgtgtcagtcttagttgtaggaagtggaaacctaaaccccattactggcaccgtaagcagtgctcaggtgtttctacgttttgatgcaaacggtgttcttttaacagaacattctacactaaaaaaatactgggggtataggcagggagatagcatagatggcactccatataccaatgctgtaggattcatgcccaatttaaaagcttatccaaagtcacaaagttctactactaaaaataatatagtagggcaagtatacatgaatggagatgtttcaaaacctatgcttctcactataaccctcaatggtactgatgacagcaacagtacatattcaatgtcattttcatacacctggactaatggaagctatgttggagcaacatttggggctaactcttataccttctcatacatcgcccaagaatgaacactgtatcccaccctgcatgccaacccttcccaccccactctgtggaacaaactctgaaacacaaaataaaataaagttcaagtgttttattgattcaacagttttacaggattcgagcagttatttttcctccaccctcccaggacatggaatacaccaccctctccccccgcacagccttgaacatctgaatgccattggtgatggacatgcttttggtctccacgttccacacagtttcagagcgagccagtctcgggtcggtcagggagatgaaaccctccgggcactcccgcatctgcacctcacagctcaacagctgaggattgtcctcggtggtcgggatcacggttatctggaagaagcagaagagcggcggtgggaatcatagtccgcgaacgggatcggccggtggtgtcgcatcaggccccgcagcagtcgctgccgccgccgctccgtcaagctgctgctcagggggtccgggtccagggactccctcagcatgatgcccacggccctcagcatcagtcgtctggtgcggcgggcgcagcagcgcatgcggatctcgctcaggtcgctgcagtacgtgcaacacagaaccaccaggttgttcaacagtccatagttcaacacgctccagccgaaactcatcgcgggaaggatgctacccacgtggccgtcgtaccagatcctcaggtaaatcaagtggtgccccctccagaacacgctgcccacgtacatgatctccttgggcatgtggcggttcaccacctcccggtaccacatcaccctctggttgaacatgcagccccggatgatcctgcggaaccacagggccagcaccgccccgcccgccatgcagcgaagagaccccgggtcccggcaatggcaatggaggacccaccgctcgtacccgtggatcatctgggagctgaacaagtctatgttggcacagcacaggcatatgctcatgcatctcttcagcactctcaactcctcgggggtcaaaaccatatcccagggcacggggaactcttgcaggacagcgaaccccgcagaacagggcaatcctcgcacagaacttacattgtgcatggacagggtatcgcaatcaggcagcaccgggtgatcctccaccagagaagcgcgggtctcggtctcctcacagcgtggtaagggggccggccgatacgggtgatggcgggacgcggctgatcgtgttcgcgaccgtgtcatgatgcagttgctttcggacattttcgtacttgctgtagcagaacctggtccgggcgctgcacaccgatcgccggcggcggtctcggcgcttggaacgctcggtgttgaaattgtaaaacagccactctctcagaccgtgcagcagatctagggcctcaggagtgatgaagatcccatcatgcctgatggctctgatcacatcgaccaccgtggaatgggccagacccagccagatgatgcaattttgttgggtttcggtgacggcgggggagggaagaacaggaagaaccatgattaacttttaatccaaacggtctcggagtacttcaaaatgaagatcgcggagatggcacctctcgcccccgctgtgttggtggaaaataacagccaggtcaaaggtgatacggttctcgagatgttccacggtggcttccagcaaagcctccacgcgcacatccagaaacaagacaatagcgaaagcgggagggttctctaattcctcaatcatcatgttacactcctgcaccatccccagataattttcatttttccagccttgaatgattcgaactagttcctgaggtaaatccaagccagccatgataaagagctcgcgcagagcgccctccaccggcattcttaagcacaccctcataattccaagatattctgctcctggttcacctgcagcagattgacaagcggaatatcaaaatctctgccgcgatccctgagctcctccctcagcaataactgtaagtactctttcatatcctctccgaaatttttagccataggaccaccaggaataagattagggcaagccacagtacagataaaccgaagtcctccccagtgagcattgccaaatgcaagactgctataagcatgctggctagacccggtgatatcttccagataactggacagaaaatcgcccaggcaatttttaagaaaatcaacaaaagaaaaatcctccaggtggacgtttagagcctcgggaacaacgatgaagtaaatgcaagcggtgcgttccagcatggttagttagctgatctgtagaaaaaacaaaaatgaacattaaaccatgctagcctggcgaacaggtgggtaaatcgttctctccagcaccaggcaggccacggggtctccggcgcgaccctcgtaaaaattgtcgctatgattgaaaaccatcacagagagacgttcccggtggccggcgtgaatgattcgacaagatgaatacacccccggaacattggcgtccgcgagtgaaaaaaagcgcccgaggaagcaataaggcactacaatgctcagtctcaagtccagcaaagcgatgccatgcggatgaagcacaaaattctcaggtgcgtacaaaatgtaattactcccctcctgcacaggcagcaaagcccccgatccctccaggtacacatacaaagcctcagcgtccatagcttaccgagcagcagcacacaacaggcgcaagagtcagagaaaggctgagctctaacctgtccacccgctctctgctcaatatatagcccagatctacactgacgtaaaggccaaagtctaaaaatacccgccaaataatcacacacgcccagcacacgcccagaaaccggtgacacactcaaaaaaatacgcgcacttcctcaaacgcccaaaactgccgtcatttccgggttcccacgctacgtcatcaaaacacgactttcaaattccgtcgaccgttaaaaacgtcacccgccccgcccctaacggtcgcccgtctctcagccaatcagcgccccgcatccccaaattcaaacacctcatttgcatattaacgcgcacaaaaagtttgaggtatattattgatgatgg

SEQ ID NO: 5 - DNA, 1692 bp, Artificial Sequence
  Synthetic Construct
atggctagcctggctggcgagacaggacaggaagccgctcctctggacggcgtgctggccaaccctcccaatatcagcagcctgagccccagacagctgctgggattcccttgtgccgaggtgtccggcctgagcacagagagagtgcgggaactggctgtggccctggcccagaaaaacgtgaagctgagcaccgagcagctgcggtgcctggcccacagactgtctgagcctcccgaggatctggacgccctgcctctggatctgctgctgttcctgaaccccgacgccttcagcggacctcaggcctgcacccggttcttcagcagaatcaccaaggccaacgtggacctgctgcccagaggcgcccctgagagacagagactgctgcctgctgctctggcctgttggggagtgcggggctctctgctgtctgaagctgatgtgcgggccctgggaggcctggcttgtgatctgcctggaagattcgtggccgagagcgccgaagtgctgctgcctagactggtgtcctgtcccggccctctggaccaggatcagcaggaagctgccagagctgctctgcagggcggaggccctccttatggacctcctagcacttggagcgtgtccaccatggatgccctgaggggcctgctgccagtgctgggccagcctatcatcagatccatcccacagggcatcgtggccgcctggcggcagagaagctctagagatccctcttggcggcagcccgagcggacaatcctgcggcccaggtttcggagagaggtggaaaagaccgcctgcccctctggcaagaaggccagagagatcgacgagagcctgatcttctacaagaagtgggagctggaagcctgcgtggacgccgctctgctggccacccagatggacagagtgaacgccatccccttcacctatgagcagctggacgtgctgaagcacaagctggatgagctgtacccccagggctaccccgagagcgtgatccagcacctgggctacctgtttctgaagatgagccccgaggacatccggaagtggaacgtgaccagcctggaaaccctgaaggccctgctggaagtgaacaagggccacgagatgtccccccaggtggccacactgatcgacagattcgtgaagggcagaggccagctggacaaggacaccctggatacactgaccgccttctaccccggctatctgtgcagcctgtcccccgaggaactgagcagcgtgccacctagctctatctgggctgtgcggccccaggacctggatacctgcgatcctagacagctggatgtgctgtatcccaaggcccggctggccttccagaacatgaacggcagcgagtacttcgtgaagatccagtccttcctgggcggagcccctaccgaggacctgaaagctctgagccagcagaacgtgtccatggatctggccacctttatgaagctgcggaccgacgccgtgctgcctctgacagtggctgaggtgcagaaactgctgggcccccatgtggaagggctgaaggccgaagaacggcacagacccgtgcgcgactggatcctgaggcagagacaggatgacctggacacactgggcctgggactgcaggggggcatccctaatggctacctggtgctggacctgagcatgcaggaagccctg

SEQ ID NO: 6 - protein, 564 aa, Artificial Sequence
  Synthetic Construct
MASLAGETGQEAAPLDGVLANPPNISSLSPRQLLGFPCAEVSGLSTERVRELAVALAQKNVKLSTEQLRCLAHRLSEPPEDLDALPLDLLLFLNPDAFSGPQACTRFFSRITKANVDLLPRGAPERQRLLPAALACWGVRGSLLSEADVRALGGLACDLPGRFVAESAEVLLPRLVSCPGPLDQDQQEAARAALQGGGPPYGPPSTWSVSTMDALRGLLPVLGQPIIRSIPQGIVAAWRQRSSRDPSWRQPERTILRPRFRREVEKTACPSGKKAREIDESLIFYKKWELEACVDAALLATQMDRVNAIPFTYEQLDVLKHKLDELYPQGYPESVIQHLGYLFLKMSPEDIRKWNVTSLETLKALLEVNKGHEMSPQVATLIDRFVKGRGQLDKDTLDTLTAFYPGYLCSLSPEELSSVPPSSIWAVRPQDLDTCDPRQLDVLYPKARLAFQNMNGSEYFVKIQSFLGGAPTEDLKALSQQNVSMDLATFMKLRTDAVLPLTVAEVQKLLGPHVEGLKAEERHRPVRDWILRQRQDDLDTLGLGLQGGIPNGYLVLDLSMQEAL

SEQ ID NO: 7 - DNA, 1611 bp, Artificial Sequence
  Synthetic Construct
atggctagcacccctggaacccagagccccttcttccttctgctgctgctgaccgtgctgactgtcgtgacaggctctggccacgccagctctacacctggcggcgagaaagagacaagcgccacccagagaagcagcgtgccaagcagcaccgagaagaacgccgtgtccatgaccagctccgtgctgagcagccactctcctggcagcggcagcagcacaacacagggccaggatgtgacactggcccctgccacagaacctgcctctggatctgccgccacctggggacaggacgtgacaagcgtgccagtgaccagacctgccctgggctctacaacaccccctgcccacgatgtgaccagcgcccctgataacaagcctgcccctggaagcacagcccctccagctcatggcgtgacctctgccccagataccagaccagccccaggatctacagccccacccgcacacggcgtgacaagtgcccctgacacaagacccgctccaggctctactgctcctcctgcccatggcgtgacaagcgctcccgatacaaggccagctcctggctccacagcaccaccagcacatggcgtgacatcagctcccgacactagacctgctcccggatcaaccgctccaccagctcacggcgtgaccagcgcacctgataccagacctgctctgggaagcaccgcccctcccgtgcacaatgtgacatctgcttccggcagcgccagcggctctgcctctacactggtgcacaacggcaccagcgccagagccacaacaaccccagccagcaagagcacccccttcagcatccctagccaccacagcgacacccctaccacactggccagccactccaccaagaccgatgcctctagcacccaccactccagcgtgccccctctgaccagcagcaaccacagcacaagcccccagctgtctaccggcgtctcattcttctttctgtccttccacatcagcaacctgcagttcaacagcagcctggaagatcccagcaccgactactaccaggaactgcagcgggatatcagcgagatgttcctgcaaatctacaagcagggcggcttcctgggcctgagcaacatcaagttcagacccggcagcgtggtggtgcagctgaccctggctttccgggaaggcaccatcaacgtgcacgacgtggaaacccagttcaaccagtacaagaccgaggccgccagccggtacaacctgaccatctccgatgtgtccgtgtccgacgtgcccttcccattctctgcccagtctggcgcaggcgtgccaggatggggaattgctctgctggtgctcgtgtgcgtgctggtggccctggccatcgtgtatctgattgccctggccgtgtgccagtgccggcggaagaattacggccagctggacatcttccccgccagagacacctaccaccccatgagcgagtaccccacataccacacccacggcagatacgtgccacccagctccaccgacagatccccctacgagaaagtgtctgccggcaacggcggcagctccctgagctacacaaatcctgccgtggccgctgcctccgccaacctg

SEQ ID NO: 8 - protein, 536 aa, Artificial Sequence
  Synthetic Construct
MASTPGTQSPFFLLLLLTVLTVVTGSGHASSTPGGEKETSATQRSSVPSSTEKNAVSMTSSVLSSHSPGSGSSTTQGQDVTLAPATEPASGSAATWGQDVTSVPVTRPALGSTTPPAHDVTSAPDNKPAPGSTAPPAHGVTSAPDTRPAPGSTAPPAHGVTSAPDTRPAPGSTAPPAHGVTSAPDTRPAPGSTAPPAHGVTSAPDTRPAPGSTAPPAHGVTSAPDTRPALGSTAPPVHNVTSASGSASGSASTLVHNGTSARATTTPASKSTPFSIPSHHSDTPTTLASHSTKTDASSTHHSSVPPLTSSNHSTSPQLSTGVSFFFLSFHISNLQFNSSLEDPSTDYYQELQRDISEMFLQIYKQGGFLGLSNIKFRPGSVVVQLTLAFREGTINVHDVETQFNQYKTEAASRYNLTISDVSVSDVPFPFSAQSGAGVPGWGIALLVLVCVLVALAIVYLIALAVCQCRRKNYGQLDIFPARDTYHPMSEYPTYHTHGRYVPPSSTDRSPYEKVSAGNGGSSLSYTNPAVAAASAN

SEQ ID NO: 9 - DNA, 2679 bp, Artificial Sequence
  Synthetic Construct
atgggagctgccccggagccggagaggacccccgttggccagggatcgtgggcccatccgggacgcaccaggggaccatccgacaggggattctgtgtggtgtcaccggccaggccagcagaagaggcaaccagcctcgagggagcgttgtctggaaccagacattcccacccgtcggtgggccggcagcaccacgcgggaccaccgtccacttccagaccgccacggccatgggacaccccttgcccgcctgtgtatgccgagactaaacacttcctgtactcatccggagacaaggaacagcttcggccgtccttcctcctgtcgtcgctcagaccgagcctgaccggagcacgcagattggtggaaactatcttccttgggtcacgtccgtggatgccaggtaccccacggcgcctcccgcgcctcccacagagatactggcagatgcggcctctgttcctggaattgctgggaaaccacgctcagtgcccgtacggagtcctgctcaagactcactgccctctgagggcggcggtcactccggcggccggagtgtgcgcacgggagaagccccagggaagcgtggcagctccggaagaggaggacaccgatccgcgccgcctcgtgcaacttctgcgccagcactcctcgccctggcaagtctacgggttcgtccgcgcctgcctgcgccgcctggtgccgcctgggctctggggttcccggcataacgagcgccgcttcctgagaaatactaagaagtttatctcacttggaaaacatgccaagttgtcgctgcaagaactcacgtggaagatgtcagtccgcgattgcgcctggctgcgccgctcgccgggcgtcgggtgtgttccagctgcagaacaccgcctgagagaagaaattctggccaaatttctgcattggctgatgtcagtgtacgtggtcgagctgctgcgctcctttttctacgtcactgagactacctttcaaaagaaccgcctgttcttctaccgcaaatctgtgtggagcaagctgcagtcaatcggcattcgccagcatctgaagagggtgcagctgcgggaactttccgaggcagaagtccgccagcaccgggaggcccggccggcgcttctcacgtcgcgtctgagattcatcccaaagcccgacgggctgaggcctatcgtcaacatggattacgtcgtgggcgctcgcacctttcgccgtgaaaagcgggccgaacgcttgacctcacgggtgaaggccctcttctccgtgctgaactacgagagagcaagacggcctggcctgctgggagcttcggtgctgggactggacgatatccaccgggcttggcggacctttgttctccgggtgagagcccaagaccctccgccggaactgtacttcgtgaaggtggcgatcaccggagcctatgatactattccgcaagatcgactcaccgaagtcatcgcctcgatcatcaaaccgcagaacacttactgcgtcaggcggtacgccgtggtccagaaggccgcgcatggccacgtgagaaaggcgttcaagtcgcacgtgtccactctcaccgacctccagccttacatgaggcaattcgttgcgcatttgcaagagacttcgcccctgagagatgcggtggtcatcgagcagagctccagcctgaacgaagcgagcagcggtctgtttgacgtgttcctccgcttcatgtgtcatcacgcggtgcgaatcaggggaaaatcatacgtgcagtgccagggaatcccacaaggcagcattctgtcgactctcttgtgttccctttgctacggcgatatggaaaacaagctgttcgctgggatcagacgggacgggttgctgctcagactggtggacgacttcctgctggtgactccgcacctcactcacgccaaaacctttctccgcactctggtgaggggagtgccagaatacggctgtgtggtcaatctccggaaaactgtggtgaatttccctgtcgaggatgaggcactcggaggaaccgcatttgtccaaatgccagcacatggcctgttcccatggtgcggtctgctgctggacacccgaactcttgaagtgcagtccgactactccagctatgcccggacgagcatccgcgccagcctcactttcaatcgcggctttaaggccggacgaaacatgcgcagaaagcttttcggagtcctccggcttaaatgccattcgctctttctcgatctccaagtcaattcgctgcagaccgtgtgcacgaacatctacaagatcctgctgctccaagcctaccggttccacgcttgcgtgcttcagctgccgtttcaccaacaggtgtggaagaacccgaccttctttctgcgggtcattagcgatactgcctccctgtgttactcaatcctcaaggcaaagaacgccggaatgtcgctgggtgcgaaaggagccgcgggacctcttcctagcgaagcggtgcagtggctctgccaccaggctttcctcctgaagctgaccaggcacagagtgacctacgtcccgctgctgggctcgctgcgcactgcacagacccagctgtctagaaaactccccggcaccaccctgaccgctctggaagccgccgccaacccagcattgccgtcagatttcaagaccatcttggac

SEQ ID NO: 10 - protein, 893 aa, Artificial Sequence
  Synthetic Construct
MGAAPEPERTPVGQGSWAHPGRTRGPSDRGFCVVSPARPAEEATSLEGALSGTRHSHPSVGRQHHAGPPSTSRPPRPWDTPCPPVYAETKHFLYSSGDKEQLRPSFLLSSLRPSLTGARRLVETIFLGSRPWMPGTPRRLPRLPQRYWQMRPLFLELLGNHAQCPYGVLLKTHCPLRAAVTPAAGVCAREKPQGSVAAPEEEDTDPRRLVQLLRQHSSPWQVYGFVRACLRRLVPPGLWGSRHNERRFLRNTKKFISLGKHAKLSLQELTWKMSVRDCAWLRRSPGVGCVPAAEHRLREEILAKFLHWLMSVYVVELLRSFFYVTETTFQKNRLFFYRKSVWSKLQSIGIRQHLKRVQLRELSEAEVRQHREARPALLTSRLRFIPKPDGLRPIVNMDYVVGARTFRREKRAERLTSRVKALFSVLNYERARRPGLLGASVLGLDDIHRAWRTFVLRVRAQDPPPELYFVKVAITGAYDTIPQDRLTEVIASIIKPQNTYCVRRYAVVQKAAHGHVRKAFKSHVSTLTDLQPYMRQFVAHLQETSPLRDAVVIEQSSSLNEASSGLFDVFLRFMCHHAVRIRGKSYVQCQGIPQGSILSTLLCSLCYGDMENKLFAGIRRDGLLLRLVDDFLLVTPHLTHAKTFLRTLVRGVPEYGCVVNLRKTVVNFPVEDEALGGTAFVQMPAHGLFPWCGLLLDTRTLEVQSDYSSYARTSIRASLTFNRGFKAGRNMRRKLFGVLRLKCHSLFLDLQVNSLQTVCTNIYKILLLQAYRFHACVLQLPFHQQVWKNPTFFLRVISDTASLCYSILKAKNAGMSLGAKGAAGPLPSEAVQWLCHQAFLLKLTRHRVTYVPLLGSLRTAQTQLSRKLPGTTLTALEAAANPALPSDFKTILD

SEQ ID NO: 11 - DNA, 1782 bp, Artificial Sequence
  Synthetic Construct
atggctagcgccaaatttctgcattggctgatgtcagtgtacgtggtcgagctgctgcgctcctttttctacgtcactgagactacctttcaaaagaaccgcctgttcttctaccgcaaatctgtgtggagcaagctgcagtcaatcggcattcgccagcatctgaagagggtgcagctgcgggaactttccgaggcagaagtccgccagcaccgggaggcccggccggcgcttctcacgtcgcgtctgagattcatcccaaagcccgacgggctgaggcctatcgtcaacatggattacgtcgtgggcgctcgcacctttcgccgtgaaaagcgggccgaacgcttgacctcacgggtgaaggccctcttctccgtgctgaactacgagagagcaagacggcctggcctgctgggagcttcggtgctgggactggacgatatccaccgggcttggcggacctttgttctccgggtgagagcccaagaccctccgccggaactgtacttcgtgaaggtggcgatcaccggagcctatgatactattccgcaagatcgactcaccgaagtcatcgcctcgatcatcaaaccgcagaacacttactgcgtcaggcggtacgccgtggtccagaaggccgcgcatggccacgtgagaaaggcgttcaagtcgcacgtgtccactctcaccgacctccagccttacatgaggcaattcgttgcgcatttgcaagagacttcgcccctgagagatgcggtggtcatcgagcagagctccagcctgaacgaagcgagcagcggtctgtttgacgtgttcctccgcttcatgtgtcatcacgcggtgcgaatcaggggaaaatcatacgtgcagtgccagggaatcccacaaggcagcattctgtcgactctcttgtgttccctttgctacggcgatatggaaaacaagctgttcgctgggatcagacgggacgggttgctgctcagactggtggacgacttcctgctggtgactccgcacctcactcacgccaaaacctttctccgcactctggtgaggggagtgccagaatacggctgtgtggtcaatctccggaaaactgtggtgaatttccctgtcgaggatgaggcactcggaggaaccgcatttgtccaaatgccagcacatggcctgttcccatggtgcggtctgctgctggacacccgaactcttgaagtgcagtccgactactccagctatgcccggacgagcatccgcgccagcctcactttcaatcgcggctttaaggccggacgaaacatgcgcagaaagcttttcggagtcctccggcttaaatgccattcgctctttctcgatctccaagtcaattcgctgcagaccgtgtgcacgaacatctacaagatcctgctgctccaagcctaccggttccacgcttgcgtgcttcagctgccgtttcaccaacaggtgtggaagaacccgaccttctttctgcgggtcattagcgatactgcctccctgtgttactcaatcctcaaggcaaagaacgccggaatgtcgctgggtgcgaaaggagccgcgggacctcttcctagcgaagcggtgcagtggctctgccaccaggctttcctcctgaagctgaccaggcacagagtgacctacgtcccgctgctgggctcgctgcgcactgcacagacccagctgtctagaaaactccccggcaccaccctgaccgctctggaagccgccgccaacccagcattgccgtcagatttcaagaccatcttggac

SEQ ID NO: 12 - protein, 594 aa, Artificial Sequence
  Synthetic Construct
MASAKFLHWLMSVYVVELLRSFFYVTETTFQKNRLFFYRKSVWSKLQSIGIRQHLKRVQLRELSEAEVRQHREARPALLTSRLRFIPKPDGLRPIVNMDYVVGARTFRREKRAERLTSRVKALFSVLNYERARRPGLLGASVLGLDDIHRAWRTFVLRVRAQDPPPELYFVKVAITGAYDTIPQDRLTEVIASIIKPQNTYCVRRYAVVQKAAHGHVRKAFKSHVSTLTDLQPYMRQFVAHLQETSPLRDAVVIEQSSSLNEASSGLFDVFLRFMCHHAVRIRGKSYVQCQGIPQGSILSTLLCSLCYGDMENKLFAGIRRDGLLLRLVDDFLLVTPHLTHAKTFLRTLVRGVPEYGCVVNLRKTVVNFPVEDEALGGTAFVQMPAHGLFPWCGLLLDTRTLEVQSDYSSYARTSIRASLTFNRGFKAGRNMRRKLFGVLRLKCHSLFLDLQVNSLQTVCTNIYKILLLQAYRFHACVLQLPFHQQVWKNPTFFLRVISDTASLCYSILKAKNAGMSLGAKGAAGPLPSEAVQWLCHQAFLLKLTRHRVTYVPLLGSLRTAQTQLSRKLPGTTLTALEAAANPALPSDFKTILD

SEQ ID NO: 13 - DNA, 2373 bp, Artificial Sequence
  Synthetic Construct
atggctagcttcctcctgtcgtcgctcagaccgagcctgaccggagcacgcagattggtggaaactatcttccttgggtcacgtccgtggatgccaggtaccccacggcgcctcccgcgcctcccacagagatactggcagatgcggcctctgttcctggaattgctgggaaaccacgctcagtgcccgtacggagtcctgctcaagactcactgccctctgagggcggcggtcactccggcggccggagtgtgcgcacgggagaagccccagggaagcgtggcagctccggaagaggaggacaccgatccgcgccgcctcgtgcaacttctgcgccagcactcctcgccctggcaagtctacgggttcgtccgcgcctgcctgcgccgcctggtgccgcctgggctctggggttcccggcataacgagcgccgcttcctgagaaatactaagaagtttatctcacttggaaaacatgccaagttgtcgctgcaagaactcacgtggaagatgtcagtccgcgattgcgcctggctgcgccgctcgccgggcgtcgggtgtgttccagctgcagaacaccgcctgagagaagaaattctggccaaatttctgcattggctgatgtcagtgtacgtggtcgagctgctgcgctcctttttctacgtcactgagactacctttcaaaagaaccgcctgttcttctaccgcaaatctgtgtggagcaagctgcagtcaatcggcattcgccagcatctgaagagggtgcagctgcgggaactttccgaggcagaagtccgccagcaccgggaggcccggccggcgcttctcacgtcgcgtctgagattcatcccaaagcccgacgggctgaggcctatcgtcaacatggattacgtcgtgggcgctcgcacctttcgccgtgaaaagcgggccgaacgcttgacctcacgggtgaaggccctcttctccgtgctgaactacgagagagcaagacggcctggcctgctgggagcttcggtgctgggactggacgatatccaccgggcttggcggacctttgttctccgggtgagagcccaagaccctccgccggaactgtacttcgtgaaggtggcgatcaccggagcctatgatactattccgcaagatcgactcaccgaagtcatcgcctcgatcatcaaaccgcagaacacttactgcgtcaggcggtacgccgtggtccagaaggccgcgcatggccacgtgagaaaggcgttcaagtcgcacgtgtccactctcaccgacctccagccttacatgaggcaattcgttgcgcatttgcaagagacttcgcccctgagagatgcggtggtcatcgagcagagctccagcctgaacgaagcgagcagcggtctgtttgacgtgttcctccgcttcatgtgtcatcacgcggtgcgaatcaggggaaaatcatacgtgcagtgccagggaatcccacaaggcagcattctgtcgactctcttgtgttccctttgctacggcgatatggaaaacaagctgttcgctgggatcagacgggacgggttgctgctcagactggtggacgacttcctgctggtgactccgcacctcactcacgccaaaacctttctccgcactctggtgaggggagtgccagaatacggctgtgtggtcaatctccggaaaactgtggtgaatttccctgtcgaggatgaggcactcggaggaaccgcatttgtccaaatgccagcacatggcctgttcccatggtgcggtctgctgctggacacccgaactcttgaagtgcagtccgactactccagctatgcccggacgagcatccgcgccagcctcactttcaatcgcggctttaaggccggacgaaacatgcgcagaaagcttttcggagtcctccggcttaaatgccattcgctctttctcgatctccaagtcaattcgctgcagaccgtgtgcacgaacatctacaagatcctgctgctccaagcctaccggttccacgcttgcgtgcttcagctgccgtttcaccaacaggtgtggaagaacccgaccttctttctgcgggtcattagcgatactgcctccctgtgttactcaatcctcaaggcaaagaacgccggaatgtcgctgggtgcgaaaggagccgcgggacctcttcctagcgaagcggtgcagtggctctgccaccaggctttcctcctgaagctgaccaggcacagagtgacctacgtcccgctgctgggctcgctgcgcactgcacagacccagctgtctagaaaactccccggcaccaccctgaccgctctggaagccgccgccaacccagcattgccgtcagatttcaagaccatcttggac

SEQ ID NO: 14 - protein, 791 aa, Artificial Sequence
  Synthetic Construct
MASFLLSSLRPSLTGARRLVETIFLGSRPWMPGTPRRLPRLPQRYWQMRPLFLELLGNHAQCPYGVLLKTHCPLRAAVTPAAGVCAREKPQGSVAAPEEEDTDPRRLVQLLRQHSSPWQVYGFVRACLRRLVPPGLWGSRHNERRFLRNTKKFISLGKHAKLSLQELTWKMSVRDCAWLRRSPGVGCVPAAEHRLREEILAKFLHWLMSVYVVELLRSFFYVTETTFQKNRLFFYRKSVWSKLQSIGIRQHLKRVQLRELSEAEVRQHREARPALLTSRLRFIPKPDGLRPIVNMDYVVGARTFRREKRAERLTSRVKALFSVLNYERARRPGLLGASVLGLDDIHRAWRTFVLRVRAQDPPPELYFVKVAITGAYDTIPQDRLTEVIASIIKPQNTYCVRRYAVVQKAAHGHVRKAFKSHVSTLTDLQPYMRQFVAHLQETSPLRDAVVIEQSSSLNEASSGLFDVFLRFMCHHAVRIRGKSYVQCQGIPQGSILSTLLCSLCYGDMENKLFAGIRRDGLLLRLVDDFLLVTPHLTHAKTFLRTLVRGVPEYGCVVNLRKTVVNFPVEDEALGGTAFVQMPAHGLFPWCGLLLDTRTLEVQSDYSSYARTSIRASLTFNRGFKAGRNMRRKLFGVLRLKCHSLFLDLQVNSLQTVCTNIYKILLLQAYRFHACVLQLPFHQQVWKNPTFFLRVISDTASLCYSILKAKNAGMSLGAKGAAGPLPSEAVQWLCHQAFLLKLTRHRVTYVPLLGSLRTAQTQLSRKLPGTTLTALEAAANPALPSDFKTILD

SEQ ID NO: 15 - DNA, 1551 bp, Artificial Sequence
  Synthetic Construct
atggctagcacaggctctggccacgccagctctacacctggcggcgagaaagagacaagcgccacccagagaagcagcgtgccaagcagcaccgagaagaacgccgtgtccatgaccagctccgtgctgagcagccactctcctggcagcggcagcagcacaacacagggccaggatgtgacactggcccctgccacagaacctgcctctggatctgccgccacctggggacaggacgtgacaagcgtgccagtgaccagacctgccctgggctctacaacaccccctgcccacgatgtgaccagcgcccctgataacaagcctgcccctggaagcacagcccctccagctcatggcgtgacctctgccccagataccagaccagccccaggatctacagccccacccgcacacggcgtgacaagtgcccctgacacaagacccgctccaggctctactgctcctcctgcccatggcgtgacaagcgctcccgatacaaggccagctcctggctccacagcaccaccagcacatggcgtgacatcagctcccgacactagacctgctcccggatcaaccgctccaccagctcacggcgtgaccagcgcacctgataccagacctgctctgggaagcaccgcccctcccgtgcacaatgtgacatctgcttccggcagcgccagcggctctgcctctacactggtgcacaacggcaccagcgccagagccacaacaaccccagccagcaagagcacccccttcagcatccctagccaccacagcgacacccctaccacactggccagccactccaccaagaccgatgcctctagcacccaccactccagcgtgccccctctgaccagcagcaaccacagcacaagcccccagctgtctaccggcgtctcattcttctttctgtccttccacatcagcaacctgcagttcaacagcagcctggaagatcccagcaccgactactaccaggaactgcagcgggatatcagcgagatgttcctgcaaatctacaagcagggcggcttcctgggcctgagcaacatcaagttcagacccggcagcgtggtggtgcagctgaccctggctttccgggaaggcaccatcaacgtgcacgacgtggaaacccagttcaaccagtacaagaccgaggccgccagccggtacaacctgaccatctccgatgtgtccgtgtccgacgtgcccttcccattctctgcccagtctggcgcaggcgtgccaggatggggaattgctctgctggtgctcgtgtgcgtgctggtggccctggccatcgtgtatctgattgccctggccgtgtgccagtgccggcggaagaattacggccagctggacatcttccccgccagagacacctaccaccccatgagcgagtaccccacataccacacccacggcagatacgtgccacccagctccaccgacagatccccctacgagaaagtgtctgccggcaacggcggcagctccctgagctacacaaatcctgccgtggccgctgcctccgccaacctg

SEQ ID NO: 16 - protein, 517 aa, Artificial Sequence
  Synthetic Construct
MASTGSGHASSTPGGEKETSATQRSSVPSSTEKNAVSMTSSVLSSHSPGSGSSTTQGQDVTLAPATEPASGSAATWGQDVTSVPVTRPALGSTTPPAHDVTSAPDNKPAPGSTAPPAHGVTSAPDTRPAPGSTAPPAHGVTSAPDTRPAPGSTAPPAHGVTSAPDTRPAPGSTAPPAHGVTSAPDTRPAPGSTAPPAHGVTSAPDTRPALGSTAPPVHNVTSASGSASGSASTLVHNGTSARATTTPASKSTPFSIPSHHSDTPTTLASHSTKTDASSTHHSSVPPLTSSNHSTSPQLSTGVSFFFLSFHISNLQFNSSLEDPSTDYYQELQRDISEMFLQIYKQGGFLGLSNIKFRPGSVVVQLTLAFREGTINVHDVETQFNQYKTEAASRYNLTISDVSVSDVPFPFSAQSGAGVPGWGIALLVLVCVLVALAIVYLIALAVCQCRRKNYGQLDIFPARDTYHPMSEYPTYHTHGRYVPPSSTDRSPYEKVSAGNGGSSLSYTNPAVAAASANL

SEQ ID NO: 17 - DNA, 3378 bp, Artificial Sequence
  Synthetic Construct
atggctagcctggctggcgagacaggacaggaagccgctcctctggacggcgtgctggccaaccctcccaatatcagcagcctgagccccagacagctgctgggattcccttgtgccgaggtgtccggcctgagcacagagagagtgcgggaactggctgtggccctggcccagaaaaacgtgaagctgagcaccgagcagctgcggtgcctggcccacagactgtctgagcctcccgaggatctggacgccctgcctctggatctgctgctgttcctgaaccccgacgccttcagcggacctcaggcctgcacccggttcttcagcagaatcaccaaggccaacgtggacctgctgcccagaggcgcccctgagagacagagactgctgcctgctgctctggcctgttggggagtgcggggctctctgctgtctgaagctgatgtgcgggccctgggaggcctggcttgtgatctgcctggaagattcgtggccgagagcgccgaagtgctgctgcctagactggtgtcctgtcccggccctctggaccaggatcagcaggaagctgccagagctgctctgcagggcggaggccctccttatggacctcctagcacttggagcgtgtccaccatggatgccctgaggggcctgctgccagtgctgggccagcctatcatcagatccatcccacagggcatcgtggccgcctggcggcagagaagctctagagatccctcttggcggcagcccgagcggacaatcctgcggcccaggtttcggagagaggtggaaaagaccgcctgcccctctggcaagaaggccagagagatcgacgagagcctgatcttctacaagaagtgggagctggaagcctgcgtggacgccgctctgctggccacccagatggacagagtgaacgccatccccttcacctatgagcagctggacgtgctgaagcacaagctggatgagctgtacccccagggctaccccgagagcgtgatccagcacctgggctacctgtttctgaagatgagccccgaggacatccggaagtggaacgtgaccagcctggaaaccctgaaggccctgctggaagtgaacaagggccacgagatgtccccccaggtggccacactgatcgacagattcgtgaagggcagaggccagctggacaaggacaccctggatacactgaccgccttctaccccggctatctgtgcagcctgtcccccgaggaactgagcagcgtgccacctagctctatctgggctgtgcggccccaggacctggatacctgcgatcctagacagctggatgtgctgtatcccaaggcccggctggccttccagaacatgaacggcagcgagtacttcgtgaagatccagtccttcctgggcggagcccctaccgaggacctgaaagctctgagccagcagaacgtgtccatggatctggccacctttatgaagctgcggaccgacgccgtgctgcctctgacagtggctgaggtgcagaaactgctgggcccccatgtggaagggctgaaggccgaagaacggcacagacccgtgcgcgactggatcctgaggcagagacaggatgacctggacacactgggcctgggactgcaggggggcatccctaatggctacctggtgctggacctgagcatgcaggaagccctgggatccggcagaatcttcaacgcccactacgccggctacttcgccgacctgctgatccacgacatcgagacaaaccctggccccacccctggaacccagagccccttcttccttctgctgctgctgaccgtgctgactgtcgtgacaggctctggccacgccagctctacacctggcggcgagaaagagacaagcgccacccagagaagcagcgtgccaagcagcaccgagaagaacgccgtgtccatgaccagctccgtgctgagcagccactctcctggcagcggcagcagcacaacacagggccaggatgtgacactggcccctgccacagaacctgcctctggatctgccgccacctggggacaggacgtgacaagcgtgccagtgaccagacctgccctgggctctacaacaccccctgcccacgatgtgaccagcgcccctgataacaagcctgcccctggaagcacagcccctccagctcatggcgtgacctctgccccagataccagaccagccccaggatctacagccccacccgcacacggcgtgacaagtgcccctgacacaagacccgctccaggctctactgctcctcctgcccatggcgtgacaagcgctcccgatacaaggccagctcctggctccacagcaccaccagcacatggcgtgacatcagctcccgacactagacctgctcccggatcaaccgctccaccagctcacggcgtgaccagcgcacctgataccagacctgctctgggaagcaccgcccctcccgtgcacaatgtgacatctgcttccggcagcgccagcggctctgcctctacactggtgcacaacggcaccagcgccagagccacaacaaccccagccagcaagagcacccccttcagcatccctagccaccacagcgacacccctaccacactggccagccactccaccaagaccgatgcctctagcacccaccactccagcgtgccccctctgaccagcagcaaccacagcacaagcccccagctgtctaccggcgtctcattcttctttctgtccttccacatcagcaacctgcagttcaacagcagcctggaagatcccagcaccgactactaccaggaactgcagcgggatatcagcgagatgttcctgcaaatctacaagcagggcggcttcctgggcctgagcaacatcaagttcagacccggcagcgtggtggtgcagctgaccctggctttccgggaaggcaccatcaacgtgcacgacgtggaaacccagttcaaccagtacaagaccgaggccgccagccggtacaacctgaccatctccgatgtgtccgtgtccgacgtgcccttcccattctctgcccagtctggcgcaggcgtgccaggatggggaattgctctgctggtgctcgtgtgcgtgctggtggccctggccatcgtgtatctgattgccctggccgtgtgccagtgccggcggaagaattacggccagctggacatcttccccgccagagacacctaccaccccatgagcgagtaccccacataccacacccacggcagatacgtgccacccagctccaccgacagatccccctacgagaaagtgtctgccggcaacggcggcagctccctgagctacacaaatcctgccgtggccgctgcctccgccaacctg

SEQ ID NO: 18 - protein, 1126 aa, Artificial Sequence
  Synthetic Construct
MASLAGETGQEAAPLDGVLANPPNISSLSPRQLLGFPCAEVSGLSTERVRELAVALAQKNVKLSTEQLRCLAHRLSEPPEDLDALPLDLLLFLNPDAFSGPQACTRFFSRITKANVDLLPRGAPERQRLLPAALACWGVRGSLLSEADVRALGGLACDLPGRFVAESAEVLLPRLVSCPGPLDQDQQEAARAALQGGGPPYGPPSTWSVSTMDALRGLLPVLGQPIIRSIPQGIVAAWRQRSSRDPSWRQPERTILRPRFRREVEKTACPSGKKAREIDESLIFYKKWELEACVDAALLATQMDRVNAIPFTYEQLDVLKHKLDELYPQGYPESVIQHLGYLFLKMSPEDIRKWNVTSLETLKALLEVNKGHEMSPQVATLIDRFVKGRGQLDKDTLDTLTAFYPGYLCSLSPEELSSVPPSSIWAVRPQDLDTCDPRQLDVLYPKARLAFQNMNGSEYFVKIQSFLGGAPTEDLKALSQQNVSMDLATFMKLRTDAVLPLTVAEVQKLLGPHVEGLKAEERHRPVRDWILRQRQDDLDTLGLGLQGGIPNGYLVLDLSMQEALGSGRIFNAHYAGYFADLLIHDIETNPGPTPGTQSPFFLLLLLTVLTVVTGSGHASSTPGGEKETSATQRSSVPSSTEKNAVSMTSSVLSSHSPGSGSSTTQGQDVTLAPATEPASGSAATWGQDVTSVPVTRPALGSTTPPAHDVTSAPDNKPAPGSTAPPAHGVTSAPDTRPAPGSTAPPAHGVTSAPDTRPAPGSTAPPAHGVTSAPDTRPAPGSTAPPAHGVTSAPDTRPAPGSTAPPAHGVTSAPDTRPALGSTAPPVHNVTSASGSASGSASTLVHNGTSARATTTPASKSTPFSIPSHHSDTPTTLASHSTKTDASSTHHSSVPPLTSSNHSTSPQLSTGVSFFFLSFHISNLQFNSSLEDPSTDYYQELQRDISEMFLQIYKQGGFLGLSNIKFRPGSVVVQLTLAFREGTINVHDVETQFNQYKTEAASRYNLTISDVSVSDVPFPFSAQSGAGVPGWGIALLVLVCVLVALAIVYLIALAVCQCRRKNYGQLDIFPARDTYHPMSEYPTYHTHGRYVPPSSTDRSPYEKVSAGNGGSSLSYTNPAVAAASANL

SEQ ID NO: 19 - DNA, 3378 bp, Artificial Sequence
  Synthetic Construct
atggctagcacccctggaacccagagccccttcttccttctgctgctgctgaccgtgctgactgtcgtgacaggctctggccacgccagctctacacctggcggcgagaaagagacaagcgccacccagagaagcagcgtgccaagcagcaccgagaagaacgccgtgtccatgaccagctccgtgctgagcagccactctcctggcagcggcagcagcacaacacagggccaggatgtgacactggcccctgccacagaacctgcctctggatctgccgccacctggggacaggacgtgacaagcgtgccagtgaccagacctgccctgggctctacaacaccccctgcccacgatgtgaccagcgcccctgataacaagcctgcccctggaagcacagcccctccagctcatggcgtgacctctgccccagataccagaccagccccaggatctacagccccacccgcacacggcgtgacaagtgcccctgacacaagacccgctccaggctctactgctcctcctgcccatggcgtgacaagcgctcccgatacaaggccagctcctggctccacagcaccaccagcacatggcgtgacatcagctcccgacactagacctgctcccggatcaaccgctccaccagctcacggcgtgaccagcgcacctgataccagacctgctctgggaagcaccgcccctcccgtgcacaatgtgacatctgcttccggcagcgccagcggctctgcctctacactggtgcacaacggcaccagcgccagagccacaacaaccccagccagcaagagcacccccttcagcatccctagccaccacagcgacacccctaccacactggccagccactccaccaagaccgatgcctctagcacccaccactccagcgtgccccctctgaccagcagcaaccacagcacaagcccccagctgtctaccggcgtctcattcttctttctgtccttccacatcagcaacctgcagttcaacagcagcctggaagatcccagcaccgactactaccaggaactgcagcgggatatcagcgagatgttcctgcaaatctacaagcagggcggcttcctgggcctgagcaacatcaagttcagacccggcagcgtggtggtgcagctgaccctggctttccgggaaggcaccatcaacgtgcacgacgtggaaacccagttcaaccagtacaagaccgaggccgccagccggtacaacctgaccatctccgatgtgtccgtgtccgacgtgcccttcccattctctgcccagtctggcgcaggcgtgccaggatggggaattgctctgctggtgctcgtgtgcgtgctggtggccctggccatcgtgtatctgattgccctggccgtgtgccagtgccggcggaagaattacggccagctggacatcttccccgccagagacacctaccaccccatgagcgagtaccccacataccacacccacggcagatacgtgccacccagctccaccgacagatccccctacgagaaagtgtctgccggcaacggcggcagctccctgagctacacaaatcctgccgtggccgctgcctccgccaacctgggatccggcagaatcttcaacgcccactacgccggctacttcgccgacctgctgatccacgacatcgagacaaaccctggccccctggctggcgagacaggacaggaagccgctcctctggacggcgtgctggccaaccctcccaatatcagcagcctgagccccagacagctgctgggattcccttgtgccgaggtgtccggcctgagcacagagagagtgcgggaactggctgtggccctggcccagaaaaacgtgaagctgagcaccgagcagctgcggtgcctggcccacagactgtctgagcctcccgaggatctggacgccctgcctctggatctgctgctgttcctgaaccccgacgccttcagcggacctcaggcctgcacccggttcttcagcagaatcaccaaggccaacgtggacctgctgcccagaggcgcccctgagagacagagactgctgcctgctgctctggcctgttggggagtgcggggctctctgctgtctgaagctgatgtgcgggccctgggaggcctggcttgtgatctgcctggaagattcgtggccgagagcgccgaagtgctgctgcctagactggtgtcctgtcccggccctctggaccaggatcagcaggaagctgccagagctgctctgcagggcggaggccctccttatggacctcctagcacttggagcgtgtccaccatggatgccctgaggggcctgctgccagtgctgggccagcctatcatcagatccatcccacagggcatcgtggccgcctggcggcagagaagctctagagatccctcttggcggcagcccgagcggacaatcctgcggcccaggtttcggagagaggtggaaaagaccgcctgcccctctggcaagaaggccagagagatcgacgagagcctgatcttctacaagaagtgggagctggaagcctgcgtggacgccgctctgctggccacccagatggacagagtgaacgccatccccttcacctatgagcagctggacgtgctgaagcacaagctggatgagctgtacccccagggctaccccgagagcgtgatccagcacctgggctacctgtttctgaagatgagccccgaggacatccggaagtggaacgtgaccagcctggaaaccctgaaggccctgctggaagtgaacaagggccacgagatgtccccccaggtggccacactgatcgacagattcgtgaagggcagaggccagctggacaaggacaccctggatacactgaccgccttctaccccggctatctgtgcagcctgtcccccgaggaactgagcagcgtgccacctagctctatctgggctgtgcggccccaggacctggatacctgcgatcctagacagctggatgtgctgtatcccaaggcccggctggccttccagaacatgaacggcagcgagtacttcgtgaagatccagtccttcctgggcggagcccctaccgaggacctgaaagctctgagccagcagaacgtgtccatggatctggccacctttatgaagctgcggaccgacgccgtgctgcctctgacagtggctgaggtgcagaaactgctgggcccccatgtggaagggctgaaggccgaagaacggcacagacccgtgcgcgactggatcctgaggcagagacaggatgacctggacacactgggcctgggactgcaggggggcatccctaatggctacctggtgctggacctgagcatgcaggaagccctg

SEQ ID NO: 20 - protein, 1126 aa, Artificial Sequence
  Synthetic Construct
MASTPGTQSPFFLLLLLTVLTVVTGSGHASSTPGGEKETSATQRSSVPSSTEKNAVSMTSSVLSSHSPGSGSSTTQGQDVTLAPATEPASGSAATWGQDVTSVPVTRPALGSTTPPAHDVTSAPDNKPAPGSTAPPAHGVTSAPDTRPAPGSTAPPAHGVTSAPDTRPAPGSTAPPAHGVTSAPDTRPAPGSTAPPAHGVTSAPDTRPAPGSTAPPAHGVTSAPDTRPALGSTAPPVHNVTSASGSASGSASTLVHNGTSARATTTPASKSTPFSIPSHHSDTPTTLASHSTKTDASSTHHSSVPPLTSSNHSTSPQLSTGVSFFFLSFHISNLQFNSSLEDPSTDYYQELQRDISEMFLQIYKQGGFLGLSNIKFRPGSVVVQLTLAFREGTINVHDVETQFNQYKTEAASRYNLTISDVSVSDVPFPFSAQSGAGVPGWGIALLVLVCVLVALAIVYLIALAVCQCRRKNYGQLDIFPARDTYHPMSEYPTYHTHGRYVPPSSTDRSPYEKVSAGNGGSSLSYTNPAVAAASANLGSGRIFNAHYAGYFADLLIHDIETNPGPLAGETGQEAAPLDGVLANPPNISSLSPRQLLGFPCAEVSGLSTERVRELAVALAQKNVKLSTEQLRCLAHRLSEPPEDLDALPLDLLLFLNPDAFSGPQACTRFFSRITKANVDLLPRGAPERQRLLPAALACWGVRGSLLSEADVRALGGLACDLPGRFVAESAEVLLPRLVSCPGPLDQDQQEAARAALQGGGPPYGPPSTWSVSTMDALRGLLPVLGQPIIRSIPQGIVAAWRQRSSRDPSWRQPERTILRPRFRREVEKTACPSGKKAREIDESLIFYKKWELEACVDAALLATQMDRVNAIPFTYEQLDVLKHKLDELYPQGYPESVIQHLGYLFLKMSPEDIRKWNVTSLETLKALLEVNKGHEMSPQVATLIDRFVKGRGQLDKDTLDTLTAFYPGYLCSLSPEELSSVPPSSIWAVRPQDLDTCDPRQLDVLYPKARLAFQNMNGSEYFVKIQSFLGGAPTEDLKALSQQNVSMDLATFMKLRTDAVLPLTVAEVQKLLGPHVEGLKAEERHRPVRDWILRQRQDDLDTLGLGLQGGIPNGYLVLDLSMQEAL

SEQ ID NO: 21 - DNA, 3360 bp, Artificial Sequence
  Synthetic Construct
atggctagcacccctggaacccagagccccttcttccttctgctgctgctgaccgtgctgactgtcgtgacaggctctggccacgccagctctacacctggcggcgagaaagagacaagcgccacccagagaagcagcgtgccaagcagcaccgagaagaacgccgtgtccatgaccagctccgtgctgagcagccactctcctggcagcggcagcagcacaacacagggccaggatgtgacactggcccctgccacagaacctgcctctggatctgccgccacctggggacaggacgtgacaagcgtgccagtgaccagacctgccctgggctctacaacaccccctgcccacgatgtgaccagcgcccctgataacaagcctgcccctggaagcacagcccctccagctcatggcgtgacctctgccccagataccagaccagccccaggatctacagccccacccgcacacggcgtgacaagtgcccctgacacaagacccgctccaggctctactgctcctcctgcccatggcgtgacaagcgctcccgatacaaggccagctcctggctccacagcaccaccagcacatggcgtgacatcagctcccgacactagacctgctcccggatcaaccgctccaccagctcacggcgtgaccagcgcacctgataccagacctgctctgggaagcaccgcccctcccgtgcacaatgtgacatctgcttccggcagcgccagcggctctgcctctacactggtgcacaacggcaccagcgccagagccacaacaaccccagccagcaagagcacccccttcagcatccctagccaccacagcgacacccctaccacactggccagccactccaccaagaccgatgcctctagcacccaccactccagcgtgccccctctgaccagcagcaaccacagcacaagcccccagctgtctaccggcgtctcattcttctttctgtccttccacatcagcaacctgcagttcaacagcagcctggaagatcccagcaccgactactaccaggaactgcagcgggatatcagcgagatgttcctgcaaatctacaagcagggcggcttcctgggcctgagcaacatcaagttcagacccggcagcgtggtggtgcagctgaccctggctttccgggaaggcaccatcaacgtgcacgacgtggaaacccagttcaaccagtacaagaccgaggccgccagccggtacaacctgaccatctccgatgtgtccgtgtccgacgtgcccttcccattctctgcccagtctggcgcaggcgtgccaggatggggaattgctctgctggtgctcgtgtgcgtgctggtggccctggccatcgtgtatctgattgccctggccgtgtgccagtgccggcggaagaattacggccagctggacatcttccccgccagagacacctaccaccccatgagcgagtaccccacataccacacccacggcagatacgtgccacccagctccaccgacagatccccctacgagaaagtgtctgccggcaacggcggcagctccctgagctacacaaatcctgccgtggccgctgcctccgccaacctgggatccggcgccaccaatttcagcctgctgaaacaggccggcgacgtggaagagaaccctggccctctggctggcgagacaggacaggaagccgctcctctggacggcgtgctggccaaccctcccaatatcagcagcctgagccccagacagctgctgggattcccttgtgccgaggtgtccggcctgagcacagagagagtgcgggaactggctgtggccctggcccagaaaaacgtgaagctgagcaccgagcagctgcggtgcctggcccacagactgtctgagcctcccgaggatctggacgccctgcctctggatctgctgctgttcctgaaccccgacgccttcagcggacctcaggcctgcacccggttcttcagcagaatcaccaaggccaacgtggacctgctgcccagaggcgcccctgagagacagagactgctgcctgctgctctggcctgttggggagtgcggggctctctgctgtctgaagctgatgtgcgggccctgggaggcctggcttgtgatctgcctggaagattcgtggccgagagcgccgaagtgctgctgcctagactggtgtcctgtcccggccctctggaccaggatcagcaggaagctgccagagctgctctgcagggcggaggccctccttatggacctcctagcacttggagcgtgtccaccatggatgccctgaggggcctgctgccagtgctgggccagcctatcatcagatccatcccacagggcatcgtggccgcctggcggcagagaagctctagagatccctcttggcggcagcccgagcggacaatcctgcggcccaggtttcggagagaggtggaaaagaccgcctgcccctctggcaagaaggccagagagatcgacgagagcctgatcttctacaagaagtgggagctggaagcctgcgtggacgccgctctgctggccacccagatggacagagtgaacgccatccccttcacctatgagcagctggacgtgctgaagcacaagctggatgagctgtacccccagggctaccccgagagcgtgatccagcacctgggctacctgtttctgaagatgagccccgaggacatccggaagtggaacgtgaccagcctggaaaccctgaaggccctgctggaagtgaacaagggccacgagatgtccccccaggtggccacactgatcgacagattcgtgaagggcagaggccagctggacaaggacaccctggatacactgaccgccttctaccccggctatctgtgcagcctgtcccccgaggaactgagcagcgtgccacctagctctatctgggctgtgcggccccaggacctggatacctgcgatcctagacagctggatgtgctgtatcccaaggcccggctggccttccagaacatgaacggcagcgagtacttcgtgaagatccagtccttcctgggcggagcccctaccgaggacctgaaagctctgagccagcagaacgtgtccatggatctggccacctttatgaagctgcggaccgacgccgtgctgcctctgacagtggctgaggtgcagaaactgctgggcccccatgtggaagggctgaaggccgaagaacggcacagacccgtgcgcgactggatcctgaggcagagacaggatgacctggacacactgggcctgggactgcaggggggcatccctaatggctacctggtgctggacctgagcatgcaggaagccctg

SEQ ID NO: 22 - protein, 1120 aa, Artificial Sequence
  Synthetic Construct
MASTPGTQSPFFLLLLLTVLTVVTGSGHASSTPGGEKETSATQRSSVPSSTEKNAVSMTSSVLSSHSPGSGSSTTQGQDVTLAPATEPASGSAATWGQDVTSVPVTRPALGSTTPPAHDVTSAPDNKPAPGSTAPPAHGVTSAPDTRPAPGSTAPPAHGVTSAPDTRPAPGSTAPPAHGVTSAPDTRPAPGSTAPPAHGVTSAPDTRPAPGSTAPPAHGVTSAPDTRPALGSTAPPVHNVTSASGSASGSASTLVHNGTSARATTTPASKSTPFSIPSHHSDTPTTLASHSTKTDASSTHHSSVPPLTSSNHSTSPQLSTGVSFFFLSFHISNLQFNSSLEDPSTDYYQELQRDISEMFLQIYKQGGFLGLSNIKFRPGSVVVQLTLAFREGTINVHDVETQFNQYKTEAASRYNLTISDVSVSDVPFPFSAQSGAGVPGWGIALLVLVCVLVALAIVYLIALAVCQCRRKNYGQLDIFPARDTYHPMSEYPTYHTHGRYVPPSSTDRSPYEKVSAGNGGSSLSYTNPAVAAASANLGSGATNFSLLKQAGDVEENPGPLAGETGQEAAPLDGVLANPPNISSLSPRQLLGFPCAEVSGLSTERVRELAVALAQKNVKLSTEQLRCLAHRLSEPPEDLDALPLDLLLFLNPDAFSGPQACTRFFSRITKANVDLLPRGAPERQRLLPAALACWGVRGSLLSEADVRALGGLACDLPGRFVAESAEVLLPRLVSCPGPLDQDQQEAARAALQGGGPPYGPPSTWSVSTMDALRGLLPVLGQPIIRSIPQGIVAAWRQRSSRDPSWRQPERTILRPRFRREVEKTACPSGKKAREIDESLIFYKKWELEACVDAALLATQMDRVNAIPFTYEQLDVLKHKLDELYPQGYPESVIQHLGYLFLKMSPEDIRKWNVTSLETLKALLEVNKGHEMSPQVATLIDRFVKGRGQLDKDTLDTLTAFYPGYLCSLSPEELSSVPPSSIWAVRPQDLDTCDPRQLDVLYPKARLAFQNMNGSEYFVKIQSFLGGAPTEDLKALSQQNVSMDLATFMKLRTDAVLPLTVAEVQKLLGPHVEGLKAEERHRPVRDWILRQRQDDLDTLGLGLQGGIPNGYLVLDLSMQEAL

SEQ ID NO: 23 - DNA, 3360 bp, Artificial Sequence
  Synthetic Construct
atggctagcctggctggcgagacaggacaggaagccgctcctctggacggcgtgctggccaaccctcccaatatcagcagcctgagccccagacagctgctgggattcccttgtgccgaggtgtccggcctgagcacagagagagtgcgggaactggctgtggccctggcccagaaaaacgtgaagctgagcaccgagcagctgcggtgcctggcccacagactgtctgagcctcccgaggatctggacgccctgcctctggatctgctgctgttcctgaaccccgacgccttcagcggacctcaggcctgcacccggttcttcagcagaatcaccaaggccaacgtggacctgctgcccagaggcgcccctgagagacagagactgctgcctgctgctctggcctgttggggagtgcggggctctctgctgtctgaagctgatgtgcgggccctgggaggcctggcttgtgatctgcctggaagattcgtggccgagagcgccgaagtgctgctgcctagactggtgtcctgtcccggccctctggaccaggatcagcaggaagctgccagagctgctctgcagggcggaggccctccttatggacctcctagcacttggagcgtgtccaccatggatgccctgaggggcctgctgccagtgctgggccagcctatcatcagatccatcccacagggcatcgtggccgcctggcggcagagaagctctagagatccctcttggcggcagcccgagcggacaatcctgcggcccaggtttcggagagaggtggaaaagaccgcctgcccctctggcaagaaggccagagagatcgacgagagcctgatcttctacaagaagtgggagctggaagcctgcgtggacgccgctctgctggccacccagatggacagagtgaacgccatccccttcacctatgagcagctggacgtgctgaagcacaagctggatgagctgtacccccagggctaccccgagagcgtgatccagcacctgggctacctgtttctgaagatgagccccgaggacatccggaagtggaacgtgaccagcctggaaaccctgaaggccctgctggaagtgaacaagggccacgagatgtccccccaggtggccacactgatcgacagattcgtgaagggcagaggccagctggacaaggacaccctggatacactgaccgccttctaccccggctatctgtgcagcctgtcccccgaggaactgagcagcgtgccacctagctctatctgggctgtgcggccccaggacctggatacctgcgatcctagacagctggatgtgctgtatcccaaggcccggctggccttccagaacatgaacggcagcgagtacttcgtgaagatccagtccttcctgggcggagcccctaccgaggacctgaaagctctgagccagcagaacgtgtccatggatctggccacctttatgaagctgcggaccgacgccgtgctgcctctgacagtggctgaggtgcagaaactgctgggcccccatgtggaagggctgaaggccgaagaacggcacagacccgtgcgcgactggatcctgaggcagagacaggatgacctggacacactgggcctgggactgcaggggggcatccctaatggctacctggtgctggacctgagcatgcaggaagccctgggatccggcgccaccaatttcagcctgctgaaacaggccggcgacgtggaagagaaccctggccctacccctggaacccagagccccttcttccttctgctgctgctgaccgtgctgactgtcgtgacaggctctggccacgccagctctacacctggcggcgagaaagagacaagcgccacccagagaagcagcgtgccaagcagcaccgagaagaacgccgtgtccatgaccagctccgtgctgagcagccactctcctggcagcggcagcagcacaacacagggccaggatgtgacactggcccctgccacagaacctgcctctggatctgccgccacctggggacaggacgtgacaagcgtgccagtgaccagacctgccctgggctctacaacaccccctgcccacgatgtgaccagcgcccctgataacaagcctgcccctggaagcacagcccctccagctcatggcgtgacctctgccccagataccagaccagccccaggatctacagccccacccgcacacggcgtgacaagtgcccctgacacaagacccgctccaggctctactgctcctcctgcccatggcgtgacaagcgctcccgatacaaggccagctcctggctccacagcaccaccagcacatggcgtgacatcagctcccgacactagacctgctcccggatcaaccgctccaccagctcacggcgtgaccagcgcacctgataccagacctgctctgggaagcaccgcccctcccgtgcacaatgtgacatctgcttccggcagcgccagcggctctgcctctacactggtgcacaacggcaccagcgccagagccacaacaaccccagccagcaagagcacccccttcagcatccctagccaccacagcgacacccctaccacactggccagccactccaccaagaccgatgcctctagcacccaccactccagcgtgccccctctgaccagcagcaaccacagcacaagcccccagctgtctaccggcgtctcattcttctttctgtccttccacatcagcaacctgcagttcaacagcagcctggaagatcccagcaccgactactaccaggaactgcagcgggatatcagcgagatgttcctgcaaatctacaagcagggcggcttcctgggcctgagcaacatcaagttcagacccggcagcgtggtggtgcagctgaccctggctttccgggaaggcaccatcaacgtgcacgacgtggaaacccagttcaaccagtacaagaccgaggccgccagccggtacaacctgaccatctccgatgtgtccgtgtccgacgtgcccttcccattctctgcccagtctggcgcaggcgtgccaggatggggaattgctctgctggtgctcgtgtgcgtgctggtggccctggccatcgtgtatctgattgccctggccgtgtgccagtgccggcggaagaattacggccagctggacatcttccccgccagagacacctaccaccccatgagcgagtaccccacataccacacccacggcagatacgtgccacccagctccaccgacagatccccctacgagaaagtgtctgccggcaacggcggcagctccctgagctacacaaatcctgccgtggccgctgcctccgccaacctg

SEQ ID NO: 24 - protein, 1120 aa, Artificial Sequence
  Synthetic Construct
MASLAGETGQEAAPLDGVLANPPNISSLSPRQLLGFPCAEVSGLSTERVRELAVALAQKNVKLSTEQLRCLAHRLSEPPEDLDALPLDLLLFLNPDAFSGPQACTRFFSRITKANVDLLPRGAPERQRLLPAALACWGVRGSLLSEADVRALGGLACDLPGRFVAESAEVLLPRLVSCPGPLDQDQQEAARAALQGGGPPYGPPSTWSVSTMDALRGLLPVLGQPIIRSIPQGIVAAWRQRSSRDPSWRQPERTILRPRFRREVEKTACPSGKKAREIDESLIFYKKWELEACVDAALLATQMDRVNAIPFTYEQLDVLKHKLDELYPQGYPESVIQHLGYLFLKMSPEDIRKWNVTSLETLKALLEVNKGHEMSPQVATLIDRFVKGRGQLDKDTLDTLTAFYPGYLCSLSPEELSSVPPSSIWAVRPQDLDTCDPRQLDVLYPKARLAFQNMNGSEYFVKIQSFLGGAPTEDLKALSQQNVSMDLATFMKLRTDAVLPLTVAEVQKLLGPHVEGLKAEERHRPVRDWILRQRQDDLDTLGLGLQGGIPNGYLVLDLSMQEALGSGATNFSLLKQAGDVEENPGPTPGTQSPFFLLLLLTVLTVVTGSGHASSTPGGEKETSATQRSSVPSSTEKNAVSMTSSVLSSHSPGSGSSTTQGQDVTLAPATEPASGSAATWGQDVTSVPVTRPALGSTTPPAHDVTSAPDNKPAPGSTAPPAHGVTSAPDTRPAPGSTAPPAHGVTSAPDTRPAPGSTAPPAHGVTSAPDTRPAPGSTAPPAHGVTSAPDTRPAPGSTAPPAHGVTSAPDTRPALGSTAPPVHNVTSASGSASGSASTLVHNGTSARATTTPASKSTPFSIPSHHSDTPTTLASHSTKTDASSTHHSSVPPLTSSNHSTSPQLSTGVSFFFLSFHISNLQFNSSLEDPSTDYYQELQRDISEMFLQIYKQGGFLGLSNIKFRPGSVVVQLTLAFREGTINVHDVETQFNQYKTEAASRYNLTISDVSVSDVPFPFSAQSGAGVPGWGIALLVLVCVLVALAIVYLIALAVCQCRRKNYGQLDIFPARDTYHPMSEYPTYHTHGRYVPPSSTDRSPYEKVSAGNGGSSLSYTNPAVAAASANL

SEQ ID NO: 25 - DNA, 4302 bp, Artificial Sequence
  Synthetic Construct
atggctagcacccctggaacccagagccccttcttccttctgctgctgctgaccgtgctgactgtcgtgacaggctctggccacgccagctctacacctggcggcgagaaagagacaagcgccacccagagaagcagcgtgccaagcagcaccgagaagaacgccgtgtccatgaccagctccgtgctgagcagccactctcctggcagcggcagcagcacaacacagggccaggatgtgacactggcccctgccacagaacctgcctctggatctgccgccacctggggacaggacgtgacaagcgtgccagtgaccagacctgccctgggctctacaacaccccctgcccacgatgtgaccagcgcccctgataacaagcctgcccctggaagcacagcccctccagctcatggcgtgacctctgccccagataccagaccagccccaggatctacagccccacccgcacacggcgtgacaagtgcccctgacacaagacccgctccaggctctactgctcctcctgcccatggcgtgacaagcgctcccgatacaaggccagctcctggctccacagcaccaccagcacatggcgtgacatcagctcccgacactagacctgctcccggatcaaccgctccaccagctcacggcgtgaccagcgcacctgataccagacctgctctgggaagcaccgcccctcccgtgcacaatgtgacatctgcttccggcagcgccagcggctctgcctctacactggtgcacaacggcaccagcgccagagccacaacaaccccagccagcaagagcacccccttcagcatccctagccaccacagcgacacccctaccacactggccagccactccaccaagaccgatgcctctagcacccaccactccagcgtgccccctctgaccagcagcaaccacagcacaagcccccagctgtctaccggcgtctcattcttctttctgtccttccacatcagcaacctgcagttcaacagcagcctggaagatcccagcaccgactactaccaggaactgcagcgggatatcagcgagatgttcctgcaaatctacaagcagggcggcttcctgggcctgagcaacatcaagttcagacccggcagcgtggtggtgcagctgaccctggctttccgggaaggcaccatcaacgtgcacgacgtggaaacccagttcaaccagtacaagaccgaggccgccagccggtacaacctgaccatctccgatgtgtccgtgtccgacgtgcccttcccattctctgcccagtctggcgcaggcgtgccaggatggggaattgctctgctggtgctcgtgtgcgtgctggtggccctggccatcgtgtatctgattgccctggccgtgtgccagtgccggcggaagaattacggccagctggacatcttccccgccagagacacctaccaccccatgagcgagtaccccacataccacacccacggcagatacgtgccacccagctccaccgacagatccccctacgagaaagtgtctgccggcaacggcggcagctccctgagctacacaaatcctgccgtggccgctgcctccgccaacctgggaggctccggcggaggagctgccccggagccggagaggacccccgttggccagggatcgtgggcccatccgggacgcaccaggggaccatccgacaggggattctgtgtggtgtcaccggccaggccagcagaagaggcaaccagcctcgagggagcgttgtctggaaccagacattcccacccgtcggtgggccggcagcaccacgcgggaccaccgtccacttccagaccgccacggccatgggacaccccttgcccgcctgtgtatgccgagactaaacacttcctgtactcatccggagacaaggaacagcttcggccgtccttcctcctgtcgtcgctcagaccgagcctgaccggagcacgcagattggtggaaactatcttccttgggtcacgtccgtggatgccaggtaccccacggcgcctcccgcgcctcccacagagatactggcagatgcggcctctgttcctggaattgctgggaaaccacgctcagtgcccgtacggagtcctgctcaagactcactgccctctgagggcggcggtcactccggcggccggagtgtgcgcacgggagaagccccagggaagcgtggcagctccggaagaggaggacaccgatccgcgccgcctcgtgcaacttctgcgccagcactcctcgccctggcaagtctacgggttcgtccgcgcctgcctgcgccgcctggtgccgcctgggctctggggttcccggcataacgagcgccgcttcctgagaaatactaagaagtttatctcacttggaaaacatgccaagttgtcgctgcaagaactcacgtggaagatgtcagtccgcgattgcgcctggctgcgccgctcgccgggcgtcgggtgtgttccagctgcagaacaccgcctgagagaagaaattctggccaaatttctgcattggctgatgtcagtgtacgtggtcgagctgctgcgctcctttttctacgtcactgagactacctttcaaaagaaccgcctgttcttctaccgcaaatctgtgtggagcaagctgcagtcaatcggcattcgccagcatctgaagagggtgcagctgcgggaactttccgaggcagaagtccgccagcaccgggaggcccggccggcgcttctcacgtcgcgtctgagattcatcccaaagcccgacgggctgaggcctatcgtcaacatggattacgtcgtgggcgctcgcacctttcgccgtgaaaagcgggccgaacgcttgacctcacgggtgaaggccctcttctccgtgctgaactacgagagagcaagacggcctggcctgctgggagcttcggtgctgggactggacgatatccaccgggcttggcggacctttgttctccgggtgagagcccaagaccctccgccggaactgtacttcgtgaaggtggcgatcaccggagcctatgatactattccgcaagatcgactcaccgaagtcatcgcctcgatcatcaaaccgcagaacacttactgcgtcaggcggtacgccgtggtccagaaggccgcgcatggccacgtgagaaaggcgttcaagtcgcacgtgtccactctcaccgacctccagccttacatgaggcaattcgttgcgcatttgcaagagacttcgcccctgagagatgcggtggtcatcgagcagagctccagcctgaacgaagcgagcagcggtctgtttgacgtgttcctccgcttcatgtgtcatcacgcggtgcgaatcaggggaaaatcatacgtgcagtgccagggaatcccacaaggcagcattctgtcgactctcttgtgttccctttgctacggcgatatggaaaacaagctgttcgctgggatcagacgggacgggttgctgctcagactggtggacgacttcctgctggtgactccgcacctcactcacgccaaaacctttctccgcactctggtgaggggagtgccagaatacggctgtgtggtcaatctccggaaaactgtggtgaatttccctgtcgaggatgaggcactcggaggaaccgcatttgtccaaatgccagcacatggcctgttcccatggtgcggtctgctgctggacacccgaactcttgaagtgcagtccgactactccagctatgcccggacgagcatccgcgccagcctcactttcaatcgcggctttaaggccggacgaaacatgcgcagaaagcttttcggagtcctccggcttaaatgccattcgctctttctcgatctccaagtcaattcgctgcagaccgtgtgcacgaacatctacaagatcctgctgctccaagcctaccggttccacgcttgcgtgcttcagctgccgtttcaccaacaggtgtggaagaacccgaccttctttctgcgggtcattagcgatactgcctccctgtgttactcaatcctcaaggcaaagaacgccggaatgtcgctgggtgcgaaaggagccgcgggacctcttcctagcgaagcggtgcagtggctctgccaccaggctttcctcctgaagctgaccaggcacagagtgacctacgtcccgctgctgggctcgctgcgcactgcacagacccagctgtctagaaaactccccggcaccaccctgaccgctctggaagccgccgccaacccagcattgccgtcagatttcaagaccatcttggac

SEQ ID NO: 26 - protein, 1434 aa, Artificial Sequence
  Synthetic Construct
MASTPGTQSPFFLLLLLTVLTVVTGSGHASSTPGGEKETSATQRSSVPSSTEKNAVSMTSSVLSSHSPGSGSSTTQGQDVTLAPATEPASGSAATWGQDVTSVPVTRPALGSTTPPAHDVTSAPDNKPAPGSTAPPAHGVTSAPDTRPAPGSTAPPAHGVTSAPDTRPAPGSTAPPAHGVTSAPDTRPAPGSTAPPAHGVTSAPDTRPAPGSTAPPAHGVTSAPDTRPALGSTAPPVHNVTSASGSASGSASTLVHNGTSARATTTPASKSTPFSIPSHHSDTPTTLASHSTKTDASSTHHSSVPPLTSSNHSTSPQLSTGVSFFFLSFHISNLQFNSSLEDPSTDYYQELQRDISEMFLQIYKQGGFLGLSNIKFRPGSVVVQLTLAFREGTINVHDVETQFNQYKTEAASRYNLTISDVSVSDVPFPFSAQSGAGVPGWGIALLVLVCVLVALAIVYLIALAVCQCRRKNYGQLDIFPARDTYHPMSEYPTYHTHGRYVPPSSTDRSPYEKVSAGNGGSSLSYTNPAVAAASANLGGSGGGAAPEPERTPVGQGSWAHPGRTRGPSDRGFCVVSPARPAEEATSLEGALSGTRHSHPSVGRQHHAGPPSTSRPPRPWDTPCPPVYAETKHFLYSSGDKEQLRPSFLLSSLRPSLTGARRLVETIFLGSRPWMPGTPRRLPRLPQRYWQMRPLFLELLGNHAQCPYGVLLKTHCPLRAAVTPAAGVCAREKPQGSVAAPEEEDTDPRRLVQLLRQHSSPWQVYGFVRACLRRLVPPGLWGSRHNERRFLRNTKKFISLGKHAKLSLQELTWKMSVRDCAWLRRSPGVGCVPAAEHRLREEILAKFLHWLMSVYVVELLRSFFYVTETTFQKNRLFFYRKSVWSKLQSIGIRQHLKRVQLRELSEAEVRQHREARPALLTSRLRFIPKPDGLRPIVNMDYVVGARTFRREKRAERLTSRVKALFSVLNYERARRPGLLGASVLGLDDIHRAWRTFVLRVRAQDPPPELYFVKVAITGAYDTIPQDRLTEVIASIIKPQNTYCVRRYAVVQKAAHGHVRKAFKSHVSTLTDLQPYMRQFVAHLQETSPLRDAVVIEQSSSLNEASSGLFDVFLRFMCHHAVRIRGKSYVQCQGIPQGSILSTLLCSLCYGDMENKLFAGIRRDGLLLRLVDDFLLVTPHLTHAKTFLRTLVRGVPEYGCVVNLRKTVVNFPVEDEALGGTAFVQMPAHGLFPWCGLLLDTRTLEVQSDYSSYARTSIRASLTFNRGFKAGRNMRRKLFGVLRLKCHSLFLDLQVNSLQTVCTNIYKILLLQAYRFHACVLQLPFHQQVWKNPTFFLRVISDTASLCYSILKAKNAGMSLGAKGAAGPLPSEAVQWLCHQAFLLKLTRHRVTYVPLLGSLRTAQTQLSRKLPGTTLTALEAAANPALPSDFKTILD

SEQ ID NO: 27 - DNA, 4371 bp, Artificial Sequence
  Synthetic Construct
atggctagcacccctggaacccagagccccttcttccttctgctgctgctgaccgtgctgactgtcgtgacaggctctggccacgccagctctacacctggcggcgagaaagagacaagcgccacccagagaagcagcgtgccaagcagcaccgagaagaacgccgtgtccatgaccagctccgtgctgagcagccactctcctggcagcggcagcagcacaacacagggccaggatgtgacactggcccctgccacagaacctgcctctggatctgccgccacctggggacaggacgtgacaagcgtgccagtgaccagacctgccctgggctctacaacaccccctgcccacgatgtgaccagcgcccctgataacaagcctgcccctggaagcacagcccctccagctcatggcgtgacctctgccccagataccagaccagccccaggatctacagccccacccgcacacggcgtgacaagtgcccctgacacaagacccgctccaggctctactgctcctcctgcccatggcgtgacaagcgctcccgatacaaggccagctcctggctccacagcaccaccagcacatggcgtgacatcagctcccgacactagacctgctcccggatcaaccgctccaccagctcacggcgtgaccagcgcacctgataccagacctgctctgggaagcaccgcccctcccgtgcacaatgtgacatctgcttccggcagcgccagcggctctgcctctacactggtgcacaacggcaccagcgccagagccacaacaaccccagccagcaagagcacccccttcagcatccctagccaccacagcgacacccctaccacactggccagccactccaccaagaccgatgcctctagcacccaccactccagcgtgccccctctgaccagcagcaaccacagcacaagcccccagctgtctaccggcgtctcattcttctttctgtccttccacatcagcaacctgcagttcaacagcagcctggaagatcccagcaccgactactaccaggaactgcagcgggatatcagcgagatgttcctgcaaatctacaagcagggcggcttcctgggcctgagcaacatcaagttcagacccggcagcgtggtggtgcagctgaccctggctttccgggaaggcaccatcaacgtgcacgacgtggaaacccagttcaaccagtacaagaccgaggccgccagccggtacaacctgaccatctccgatgtgtccgtgtccgacgtgcccttcccattctctgcccagtctggcgcaggcgtgccaggatggggaattgctctgctggtgctcgtgtgcgtgctggtggccctggccatcgtgtatctgattgccctggccgtgtgccagtgccggcggaagaattacggccagctggacatcttccccgccagagacacctaccaccccatgagcgagtaccccacataccacacccacggcagatacgtgccacccagctccaccgacagatccccctacgagaaagtgtctgccggcaacggcggcagctccctgagctacacaaatcctgccgtggccgctgcctccgccaacctgggatccggcacaatcctgtctgagggcgccaccaacttcagcctgctgaaactggccggcgacgtggaactgaaccctggccctggagctgccccggagccggagaggacccccgttggccagggatcgtgggcccatccgggacgcaccaggggaccatccgacaggggattctgtgtggtgtcaccggccaggccagcagaagaggcaaccagcctcgagggagcgttgtctggaaccagacattcccacccgtcggtgggccggcagcaccacgcgggaccaccgtccacttccagaccgccacggccatgggacaccccttgcccgcctgtgtatgccgagactaaacacttcctgtactcatccggagacaaggaacagcttcggccgtccttcctcctgtcgtcgctcagaccgagcctgaccggagcacgcagattggtggaaactatcttccttgggtcacgtccgtggatgccaggtaccccacggcgcctcccgcgcctcccacagagatactggcagatgcggcctctgttcctggaattgctgggaaaccacgctcagtgcccgtacggagtcctgctcaagactcactgccctctgagggcggcggtcactccggcggccggagtgtgcgcacgggagaagccccagggaagcgtggcagctccggaagaggaggacaccgatccgcgccgcctcgtgcaacttctgcgccagcactcctcgccctggcaagtctacgggttcgtccgcgcctgcctgcgccgcctggtgccgcctgggctctggggttcccggcataacgagcgccgcttcctgagaaatactaagaagtttatctcacttggaaaacatgccaagttgtcgctgcaagaactcacgtggaagatgtcagtccgcgattgcgcctggctgcgccgctcgccgggcgtcgggtgtgttccagctgcagaacaccgcctgagagaagaaattctggccaaatttctgcattggctgatgtcagtgtacgtggtcgagctgctgcgctcctttttctacgtcactgagactacctttcaaaagaaccgcctgttcttctaccgcaaatctgtgtggagcaagctgcagtcaatcggcattcgccagcatctgaagagggtgcagctgcgggaactttccgaggcagaagtccgccagcaccgggaggcccggccggcgcttctcacgtcgcgtctgagattcatcccaaagcccgacgggctgaggcctatcgtcaacatggattacgtcgtgggcgctcgcacctttcgccgtgaaaagcgggccgaacgcttgacctcacgggtgaaggccctcttctccgtgctgaactacgagagagcaagacggcctggcctgctgggagcttcggtgctgggactggacgatatccaccgggcttggcggacctttgttctccgggtgagagcccaagaccctccgccggaactgtacttcgtgaaggtggcgatcaccggagcctatgatactattccgcaagatcgactcaccgaagtcatcgcctcgatcatcaaaccgcagaacacttactgcgtcaggcggtacgccgtggtccagaaggccgcgcatggccacgtgagaaaggcgttcaagtcgcacgtgtccactctcaccgacctccagccttacatgaggcaattcgttgcgcatttgcaagagacttcgcccctgagagatgcggtggtcatcgagcagagctccagcctgaacgaagcgagcagcggtctgtttgacgtgttcctccgcttcatgtgtcatcacgcggtgcgaatcaggggaaaatcatacgtgcagtgccagggaatcccacaaggcagcattctgtcgactctcttgtgttccctttgctacggcgatatggaaaacaagctgttcgctgggatcagacgggacgggttgctgctcagactggtggacgacttcctgctggtgactccgcacctcactcacgccaaaacctttctccgcactctggtgaggggagtgccagaatacggctgtgtggtcaatctccggaaaactgtggtgaatttccctgtcgaggatgaggcactcggaggaaccgcatttgtccaaatgccagcacatggcctgttcccatggtgcggtctgctgctggacacccgaactcttgaagtgcagtccgactactccagctatgcccggacgagcatccgcgccagcctcactttcaatcgcggctttaaggccggacgaaacatgcgcagaaagcttttcggagtcctccggcttaaatgccattcgctctttctcgatctccaagtcaattcgctgcagaccgtgtgcacgaacatctacaagatcctgctgctccaagcctaccggttccacgcttgcgtgcttcagctgccgtttcaccaacaggtgtggaagaacccgaccttctttctgcgggtcattagcgatactgcctccctgtgttactcaatcctcaaggcaaagaacgccggaatgtcgctgggtgcgaaaggagccgcgggacctcttcctagcgaagcggtgcagtggctctgccaccaggctttcctcctgaagctgaccaggcacagagtgacctacgtcccgctgctgggctcgctgcgcactgcacagacccagctgtctagaaaactccccggcaccaccctgaccgctctggaagccgccgccaacccagcattgccgtcagatttcaagaccatcttggac

SEQ ID NO: 28 - protein, 1457 aa, Artificial Sequence
  Synthetic Construct
MASTPGTQSPFFLLLLLTVLTVVTGSGHASSTPGGEKETSATQRSSVPSSTEKNAVSMTSSVLSSHSPGSGSSTTQGQDVTLAPATEPASGSAATWGQDVTSVPVTRPALGSTTPPAHDVTSAPDNKPAPGSTAPPAHGVTSAPDTRPAPGSTAPPAHGVTSAPDTRPAPGSTAPPAHGVTSAPDTRPAPGSTAPPAHGVTSAPDTRPAPGSTAPPAHGVTSAPDTRPALGSTAPPVHNVTSASGSASGSASTLVHNGTSARATTTPASKSTPFSIPSHHSDTPTTLASHSTKTDASSTHHSSVPPLTSSNHSTSPQLSTGVSFFFLSFHISNLQFNSSLEDPSTDYYQELQRDISEMFLQIYKQGGFLGLSNIKFRPGSVVVQLTLAFREGTINVHDVETQFNQYKTEAASRYNLTISDVSVSDVPFPFSAQSGAGVPGWGIALLVLVCVLVALAIVYLIALAVCQCRRKNYGQLDIFPARDTYHPMSEYPTYHTHGRYVPPSSTDRSPYEKVSAGNGGSSLSYTNPAVAAASANLGSGTILSEGATNFSLLKLAGDVELNPGPGAAPEPERTPVGQGSWAHPGRTRGPSDRGFCVVSPARPAEEATSLEGALSGTRHSHPSVGRQHHAGPPSTSRPPRPWDTPCPPVYAETKHFLYSSGDKEQLRPSFLLSSLRPSLTGARRLVETIFLGSRPWMPGTPRRLPRLPQRYWQMRPLFLELLGNHAQCPYGVLLKTHCPLRAAVTPAAGVCAREKPQGSVAAPEEEDTDPRRLVQLLRQHSSPWQVYGFVRACLRRLVPPGLWGSRHNERRFLRNTKKFISLGKHAKLSLQELTWKMSVRDCAWLRRSPGVGCVPAAEHRLREEILAKFLHWLMSVYVVELLRSFFYVTETTFQKNRLFFYRKSVWSKLQSIGIRQHLKRVQLRELSEAEVRQHREARPALLTSRLRFIPKPDGLRPIVNMDYVVGARTFRREKRAERLTSRVKALFSVLNYERARRPGLLGASVLGLDDIHRAWRTFVLRVRAQDPPPELYFVKVAITGAYDTIPQDRLTEVIASIIKPQNTYCVRRYAVVQKAAHGHVRKAFKSHVSTLTDLQPYMRQFVAHLQETSPLRDAVVIEQSSSLNEASSGLFDVFLRFMCHHAVRIRGKSYVQCQGIPQGSILSTLLCSLCYGDMENKLFAGIRRDGLLLRLVDDFLLVTPHLTHAKTFLRTLVRGVPEYGCVVNLRKTVVNFPVEDEALGGTAFVQMPAHGLFPWCGLLLDTRTLEVQSDYSSYARTSIRASLTFNRGFKAGRNMRRKLFGVLRLKCHSLFLDLQVNSLQTVCTNIYKILLLQAYRFHACVLQLPFHQQVWKNPTFFLRVISDTASLCYSILKAKNAGMSLGAKGAAGPLPSEAVQWLCHQAFLLKLTRHRVTYVPLLGSLRTAQTQLSRKLPGTTLTALEAAANPALPSDFKTILD

SEQ ID NO: 29 - DNA, 4371 bp, Artificial Sequence
  Synthetic Construct
atggctagcggagctgccccggagccggagaggacccccgttggccagggatcgtgggcccatccgggacgcaccaggggaccatccgacaggggattctgtgtggtgtcaccggccaggccagcagaagaggcaaccagcctcgagggagcgttgtctggaaccagacattcccacccgtcggtgggccggcagcaccacgcgggaccaccgtccacttccagaccgccacggccatgggacaccccttgcccgcctgtgtatgccgagactaaacacttcctgtactcatccggagacaaggaacagcttcggccgtccttcctcctgtcgtcgctcagaccgagcctgaccggagcacgcagattggtggaaactatcttccttgggtcacgtccgtggatgccaggtaccccacggcgcctcccgcgcctcccacagagatactggcagatgcggcctctgttcctggaattgctgggaaaccacgctcagtgcccgtacggagtcctgctcaagactcactgccctctgagggcggcggtcactccggcggccggagtgtgcgcacgggagaagccccagggaagcgtggcagctccggaagaggaggacaccgatccgcgccgcctcgtgcaacttctgcgccagcactcctcgccctggcaagtctacgggttcgtccgcgcctgcctgcgccgcctggtgccgcctgggctctggggttcccggcataacgagcgccgcttcctgagaaatactaagaagtttatctcacttggaaaacatgccaagttgtcgctgcaagaactcacgtggaagatgtcagtccgcgattgcgcctggctgcgccgctcgccgggcgtcgggtgtgttccagctgcagaacaccgcctgagagaagaaattctggccaaatttctgcattggctgatgtcagtgtacgtggtcgagctgctgcgctcctttttctacgtcactgagactacctttcaaaagaaccgcctgttcttctaccgcaaatctgtgtggagcaagctgcagtcaatcggcattcgccagcatctgaagagggtgcagctgcgggaactttccgaggcagaagtccgccagcaccgggaggcccggccggcgcttctcacgtcgcgtctgagattcatcccaaagcccgacgggctgaggcctatcgtcaacatggattacgtcgtgggcgctcgcacctttcgccgtgaaaagcgggccgaacgcttgacctcacgggtgaaggccctcttctccgtgctgaactacgagagagcaagacggcctggcctgctgggagcttcggtgctgggactggacgatatccaccgggcttggcggacctttgttctccgggtgagagcccaagaccctccgccggaactgtacttcgtgaaggtggcgatcaccggagcctatgatactattccgcaagatcgactcaccgaagtcatcgcctcgatcatcaaaccgcagaacacttactgcgtcaggcggtacgccgtggtccagaaggccgcgcatggccacgtgagaaaggcgttcaagtcgcacgtgtccactctcaccgacctccagccttacatgaggcaattcgttgcgcatttgcaagagacttcgcccctgagagatgcggtggtcatcgagcagagctccagcctgaacgaagcgagcagcggtctgtttgacgtgttcctccgcttcatgtgtcatcacgcggtgcgaatcaggggaaaatcatacgtgcagtgccagggaatcccacaaggcagcattctgtcgactctcttgtgttccctttgctacggcgatatggaaaacaagctgttcgctgggatcagacgggacgggttgctgctcagactggtggacgacttcctgctggtgactccgcacctcactcacgccaaaacctttctccgcactctggtgaggggagtgccagaatacggctgtgtggtcaatctccggaaaactgtggtgaatttccctgtcgaggatgaggcactcggaggaaccgcatttgtccaaatgccagcacatggcctgttcccatggtgcggtctgctgctggacacccgaactcttgaagtgcagtccgactactccagctatgcccggacgagcatccgcgccagcctcactttcaatcgcggctttaaggccggacgaaacatgcgcagaaagcttttcggagtcctccggcttaaatgccattcgctctttctcgatctccaagtcaattcgctgcagaccgtgtgcacgaacatctacaagatcctgctgctccaagcctaccggttccacgcttgcgtgcttcagctgccgtttcaccaacaggtgtggaagaacccgaccttctttctgcgggtcattagcgatactgcctccctgtgttactcaatcctcaaggcaaagaacgccggaatgtcgctgggtgcgaaaggagccgcgggacctcttcctagcgaagcggtgcagtggctctgccaccaggctttcctcctgaagctgaccaggcacagagtgacctacgtcccgctgctgggctcgctgcgcactgcacagacccagctgtctagaaaactccccggcaccaccctgaccgctctggaagccgccgccaacccagcattgccgtcagatttcaagaccatcttggacggatccggcacaatcctgtctgagggcgccaccaacttcagcctgctgaaactggccggcgacgtggaactgaaccctggccctacccctggaacccagagccccttcttccttctgctgctgctgaccgtgctgactgtcgtgacaggctctggccacgccagctctacacctggcggcgagaaagagacaagcgccacccagagaagcagcgtgccaagcagcaccgagaagaacgccgtgtccatgaccagctccgtgctgagcagccactctcctggcagcggcagcagcacaacacagggccaggatgtgacactggcccctgccacagaacctgcctctggatctgccgccacctggggacaggacgtgacaagcgtgccagtgaccagacctgccctgggctctacaacaccccctgcccacgatgtgaccagcgcccctgataacaagcctgcccctggaagcacagcccctccagctcatggcgtgacctctgccccagataccagaccagccccaggatctacagccccacccgcacacggcgtgacaagtgcccctgacacaagacccgctccaggctctactgctcctcctgcccatggcgtgacaagcgctcccgatacaaggccagctcctggctccacagcaccaccagcacatggcgtgacatcagctcccgacactagacctgctcccggatcaaccgctccaccagctcacggcgtgaccagcgcacctgataccagacctgctctgggaagcaccgcccctcccgtgcacaatgtgacatctgcttccggcagcgccagcggctctgcctctacactggtgcacaacggcaccagcgccagagccacaacaaccccagccagcaagagcacccccttcagcatccctagccaccacagcgacacccctaccacactggccagccactccaccaagaccgatgcctctagcacccaccactccagcgtgccccctctgaccagcagcaaccacagcacaagcccccagctgtctaccggcgtctcattcttctttctgtccttccacatcagcaacctgcagttcaacagcagcctggaagatcccagcaccgactactaccaggaactgcagcgggatatcagcgagatgttcctgcaaatctacaagcagggcggcttcctgggcctgagcaacatcaagttcagacccggcagcgtggtggtgcagctgaccctggctttccgggaaggcaccatcaacgtgcacgacgtggaaacccagttcaaccagtacaagaccgaggccgccagccggtacaacctgaccatctccgatgtgtccgtgtccgacgtgcccttcccattctctgcccagtctggcgcaggcgtgccaggatggggaattgctctgctggtgctcgtgtgcgtgctggtggccctggccatcgtgtatctgattgccctggccgtgtgccagtgccggcggaagaattacggccagctggacatcttccccgccagagacacctaccaccccatgagcgagtaccccacataccacacccacggcagatacgtgccacccagctccaccgacagatccccctacgagaaagtgtctgccggcaacggcggcagctccctgagctacacaaatcctgccgtggccgctgcctccgccaacctg

SEQ ID NO: 30 - protein, 1457 aa, Artificial Sequence
  Synthetic Construct
MASGAAPEPERTPVGQGSWAHPGRTRGPSDRGFCVVSPARPAEEATSLEGALSGTRHSHPSVGRQHHAGPPSTSRPPRPWDTPCPPVYAETKHFLYSSGDKEQLRPSFLLSSLRPSLTGARRLVETIFLGSRPWMPGTPRRLPRLPQRYWQMRPLFLELLGNHAQCPYGVLLKTHCPLRAAVTPAAGVCAREKPQGSVAAPEEEDTDPRRLVQLLRQHSSPWQVYGFVRACLRRLVPPGLWGSRHNERRFLRNTKKFISLGKHAKLSLQELTWKMSVRDCAWLRRSPGVGCVPAAEHRLREEILAKFLHWLMSVYVVELLRSFFYVTETTFQKNRLFFYRKSVWSKLQSIGIRQHLKRVQLRELSEAEVRQHREARPALLTSRLRFIPKPDGLRPIVNMDYVVGARTFRREKRAERLTSRVKALFSVLNYERARRPGLLGASVLGLDDIHRAWRTFVLRVRAQDPPPELYFVKVAITGAYDTIPQDRLTEVIASIIKPQNTYCVRRYAVVQKAAHGHVRKAFKSHVSTLTDLQPYMRQFVAHLQETSPLRDAVVIEQSSSLNEASSGLFDVFLRFMCHHAVRIRGKSYVQCQGIPQGSILSTLLCSLCYGDMENKLFAGIRRDGLLLRLVDDFLLVTPHLTHAKTFLRTLVRGVPEYGCVVNLRKTVVNFPVEDEALGGTAFVQMPAHGLFPWCGLLLDTRTLEVQSDYSSYARTSIRASLTFNRGFKAGRNMRRKLFGVLRLKCHSLFLDLQVNSLQTVCTNIYKILLLQAYRFHACVLQLPFHQQVWKNPTFFLRVISDTASLCYSILKAKNAGMSLGAKGAAGPLPSEAVQWLCHQAFLLKLTRHRVTYVPLLGSLRTAQTQLSRKLPGTTLTALEAAANPALPSDFKTILDGSGTILSEGATNFSLLKLAGDVELNPGPTPGTQSPFFLLLLLTVLTVVTGSGHASSTPGGEKETSATQRSSVPSSTEKNAVSMTSSVLSSHSPGSGSSTTQGQDVTLAPATEPASGSAATWGQDVTSVPVTRPALGSTTPPAHDVTSAPDNKPAPGSTAPPAHGVTSAPDTRPAPGSTAPPAHGVTSAPDTRPAPGSTAPPAHGVTSAPDTRPAPGSTAPPAHGVTSAPDTRPAPGSTAPPAHGVTSAPDTRPALGSTAPPVHNVTSASGSASGSASTLVHNGTSARATTTPASKSTPFSIPSHHSDTPTTLASHSTKTDASSTHHSSVPPLTSSNHSTSPQLSTGVSFFFLSFHISNLQFNSSLEDPSTDYYQELQRDISEMFLQIYKQGGFLGLSNIKFRPGSVVVQLTLAFREGTINVHDVETQFNQYKTEAASRYNLTISDVSVSDVPFPFSAQSGAGVPGWGIALLVLVCVLVALAIVYLIALAVCQCRRKNYGQLDIFPARDTYHPMSEYPTYHTHGRYVPPSSTDRSPYEKVSAGNGGSSLSYTNPAVAAASANL

SEQ ID NO: 31 - DNA, 4311 bp, Artificial Sequence
  Synthetic Construct
atggctagcacaggctctggccacgccagctctacacctggcggcgagaaagagacaagcgccacccagagaagcagcgtgccaagcagcaccgagaagaacgccgtgtccatgaccagctccgtgctgagcagccactctcctggcagcggcagcagcacaacacagggccaggatgtgacactggcccctgccacagaacctgcctctggatctgccgccacctggggacaggacgtgacaagcgtgccagtgaccagacctgccctgggctctacaacaccccctgcccacgatgtgaccagcgcccctgataacaagcctgcccctggaagcacagcccctccagctcatggcgtgacctctgccccagataccagaccagccccaggatctacagccccacccgcacacggcgtgacaagtgcccctgacacaagacccgctccaggctctactgctcctcctgcccatggcgtgacaagcgctcccgatacaaggccagctcctggctccacagcaccaccagcacatggcgtgacatcagctcccgacactagacctgctcccggatcaaccgctccaccagctcacggcgtgaccagcgcacctgataccagacctgctctgggaagcaccgcccctcccgtgcacaatgtgacatctgcttccggcagcgccagcggctctgcctctacactggtgcacaacggcaccagcgccagagccacaacaaccccagccagcaagagcacccccttcagcatccctagccaccacagcgacacccctaccacactggccagccactccaccaagaccgatgcctctagcacccaccactccagcgtgccccctctgaccagcagcaaccacagcacaagcccccagctgtctaccggcgtctcattcttctttctgtccttccacatcagcaacctgcagttcaacagcagcctggaagatcccagcaccgactactaccaggaactgcagcgggatatcagcgagatgttcctgcaaatctacaagcagggcggcttcctgggcctgagcaacatcaagttcagacccggcagcgtggtggtgcagctgaccctggctttccgggaaggcaccatcaacgtgcacgacgtggaaacccagttcaaccagtacaagaccgaggccgccagccggtacaacctgaccatctccgatgtgtccgtgtccgacgtgcccttcccattctctgcccagtctggcgcaggcgtgccaggatggggaattgctctgctggtgctcgtgtgcgtgctggtggccctggccatcgtgtatctgattgccctggccgtgtgccagtgccggcggaagaattacggccagctggacatcttccccgccagagacacctaccaccccatgagcgagtaccccacataccacacccacggcagatacgtgccacccagctccaccgacagatccccctacgagaaagtgtctgccggcaacggcggcagctccctgagctacacaaatcctgccgtggccgctgcctccgccaacctgggatccggcacaatcctgtctgagggcgccaccaacttcagcctgctgaaactggccggcgacgtggaactgaaccctggccctggagctgccccggagccggagaggacccccgttggccagggatcgtgggcccatccgggacgcaccaggggaccatccgacaggggattctgtgtggtgtcaccggccaggccagcagaagaggcaaccagcctcgagggagcgttgtctggaaccagacattcccacccgtcggtgggccggcagcaccacgcgggaccaccgtccacttccagaccgccacggccatgggacaccccttgcccgcctgtgtatgccgagactaaacacttcctgtactcatccggagacaaggaacagcttcggccgtccttcctcctgtcgtcgctcagaccgagcctgaccggagcacgcagattggtggaaactatcttccttgggtcacgtccgtggatgccaggtaccccacggcgcctcccgcgcctcccacagagatactggcagatgcggcctctgttcctggaattgctgggaaaccacgctcagtgcccgtacggagtcctgctcaagactcactgccctctgagggcggcggtcactccggcggccggagtgtgcgcacgggagaagccccagggaagcgtggcagctccggaagaggaggacaccgatccgcgccgcctcgtgcaacttctgcgccagcactcctcgccctggcaagtctacgggttcgtccgcgcctgcctgcgccgcctggtgccgcctgggctctggggttcccggcataacgagcgccgcttcctgagaaatactaagaagtttatctcacttggaaaacatgccaagttgtcgctgcaagaactcacgtggaagatgtcagtccgcgattgcgcctggctgcgccgctcgccgggcgtcgggtgtgttccagctgcagaacaccgcctgagagaagaaattctggccaaatttctgcattggctgatgtcagtgtacgtggtcgagctgctgcgctcctttttctacgtcactgagactacctttcaaaagaaccgcctgttcttctaccgcaaatctgtgtggagcaagctgcagtcaatcggcattcgccagcatctgaagagggtgcagctgcgggaactttccgaggcagaagtccgccagcaccgggaggcccggccggcgcttctcacgtcgcgtctgagattcatcccaaagcccgacgggctgaggcctatcgtcaacatggattacgtcgtgggcgctcgcacctttcgccgtgaaaagcgggccgaacgcttgacctcacgggtgaaggccctcttctccgtgctgaactacgagagagcaagacggcctggcctgctgggagcttcggtgctgggactggacgatatccaccgggcttggcggacctttgttctccgggtgagagcccaagaccctccgccggaactgtacttcgtgaaggtggcgatcaccggagcctatgatactattccgcaagatcgactcaccgaagtcatcgcctcgatcatcaaaccgcagaacacttactgcgtcaggcggtacgccgtggtccagaaggccgcgcatggccacgtgagaaaggcgttcaagtcgcacgtgtccactctcaccgacctccagccttacatgaggcaattcgttgcgcatttgcaagagacttcgcccctgagagatgcggtggtcatcgagcagagctccagcctgaacgaagcgagcagcggtctgtttgacgtgttcctccgcttcatgtgtcatcacgcggtgcgaatcaggggaaaatcatacgtgcagtgccagggaatcccacaaggcagcattctgtcgactctcttgtgttccctttgctacggcgatatggaaaacaagctgttcgctgggatcagacgggacgggttgctgctcagactggtggacgacttcctgctggtgactccgcacctcactcacgccaaaacctttctccgcactctggtgaggggagtgccagaatacggctgtgtggtcaatctccggaaaactgtggtgaatttccctgtcgaggatgaggcactcggaggaaccgcatttgtccaaatgccagcacatggcctgttcccatggtgcggtctgctgctggacacccgaactcttgaagtgcagtccgactactccagctatgcccggacgagcatccgcgccagcctcactttcaatcgcggctttaaggccggacgaaacatgcgcagaaagcttttcggagtcctccggcttaaatgccattcgctctttctcgatctccaagtcaattcgctgcagaccgtgtgcacgaacatctacaagatcctgctgctccaagcctaccggttccacgcttgcgtgcttcagctgccgtttcaccaacaggtgtggaagaacccgaccttctttctgcgggtcattagcgatactgcctccctgtgttactcaatcctcaaggcaaagaacgccggaatgtcgctgggtgcgaaaggagccgcgggacctcttcctagcgaagcggtgcagtggctctgccaccaggctttcctcctgaagctgaccaggcacagagtgacctacgtcccgctgctgggctcgctgcgcactgcacagacccagctgtctagaaaactccccggcaccaccctgaccgctctggaagccgccgccaacccagcattgccgtcagatttcaagaccatcttggac

SEQ ID NO: 32 - protein, 1437 aa, Artificial Sequence
  Synthetic Construct
MASTGSGHASSTPGGEKETSATQRSSVPSSTEKNAVSMTSSVLSSHSPGSGSSTTQGQDVTLAPATEPASGSAATWGQDVTSVPVTRPALGSTTPPAHDVTSAPDNKPAPGSTAPPAHGVTSAPDTRPAPGSTAPPAHGVTSAPDTRPAPGSTAPPAHGVTSAPDTRPAPGSTAPPAHGVTSAPDTRPAPGSTAPPAHGVTSAPDTRPALGSTAPPVHNVTSASGSASGSASTLVHNGTSARATTTPASKSTPFSIPSHHSDTPTTLASHSTKTDASSTHHSSVPPLTSSNHSTSPQLSTGVSFFFLSFHISNLQFNSSLEDPSTDYYQELQRDISEMFLQIYKQGGFLGLSNIKFRPGSVVVQLTLAFREGTINVHDVETQFNQYKTEAASRYNLTISDVSVSDVPFPFSAQSGAGVPGWGIALLVLVCVLVALAIVYLIALAVCQCRRKNYGQLDIFPARDTYHPMSEYPTYHTHGRYVPPSSTDRSPYEKVSAGNGGSSLSYTNPAVAAASANLGSGTILSEGATNFSLLKLAGDVELNPGPGAAPEPERTPVGQGSWAHPGRTRGPSDRGFCVVSPARPAEEATSLEGALSGTRHSHPSVGRQHHAGPPSTSRPPRPWDTPCPPVYAETKHFLYSSGDKEQLRPSFLLSSLRPSLTGARRLVETIFLGSRPWMPGTPRRLPRLPQRYWQMRPLFLELLGNHAQCPYGVLLKTHCPLRAAVTPAAGVCAREKPQGSVAAPEEEDTDPRRLVQLLRQHSSPWQVYGFVRACLRRLVPPGLWGSRHNERRFLRNTKKFISLGKHAKLSLQELTWKMSVRDCAWLRRSPGVGCVPAAEHRLREEILAKFLHWLMSVYVVELLRSFFYVTETTFQKNRLFFYRKSVWSKLQSIGIRQHLKRVQLRELSEAEVRQHREARPALLTSRLRFIPKPDGLRPIVNMDYVVGARTFRREKRAERLTSRVKALFSVLNYERARRPGLLGASVLGLDDIHRAWRTFVLRVRAQDPPPELYFVKVAITGAYDTIPQDRLTEVIASIIKPQNTYCVRRYAVVQKAAHGHVRKAFKSHVSTLTDLQPYMRQFVAHLQETSPLRDAVVIEQSSSLNEASSGLFDVFLRFMCHHAVRIRGKSYVQCQGIPQGSILSTLLCSLCYGDMENKLFAGIRRDGLLLRLVDDFLLVTPHLTHAKTFLRTLVRGVPEYGCVVNLRKTVVNFPVEDEALGGTAFVQMPAHGLFPWCGLLLDTRTLEVQSDYSSYARTSIRASLTFNRGFKAGRNMRRKLFGVLRLKCHSLFLDLQVNSLQTVCTNIYKILLLQAYRFHACVLQLPFHQQVWKNPTFFLRVISDTASLCYSILKAKNAGMSLGAKGAAGPLPSEAVQWLCHQAFLLKLTRHRVTYVPLLGSLRTAQTQLSRKLPGTTLTALEAAANPALPSDFKTILD

SEQ ID NO: 33 - DNA, 4311 bp, Artificial Sequence
  Synthetic Construct
atggctagcggagctgccccggagccggagaggacccccgttggccagggatcgtgggcccatccgggacgcaccaggggaccatccgacaggggattctgtgtggtgtcaccggccaggccagcagaagaggcaaccagcctcgagggagcgttgtctggaaccagacattcccacccgtcggtgggccggcagcaccacgcgggaccaccgtccacttccagaccgccacggccatgggacaccccttgcccgcctgtgtatgccgagactaaacacttcctgtactcatccggagacaaggaacagcttcggccgtccttcctcctgtcgtcgctcagaccgagcctgaccggagcacgcagattggtggaaactatcttccttgggtcacgtccgtggatgccaggtaccccacggcgcctcccgcgcctcccacagagatactggcagatgcggcctctgttcctggaattgctgggaaaccacgctcagtgcccgtacggagtcctgctcaagactcactgccctctgagggcggcggtcactccggcggccggagtgtgcgcacgggagaagccccagggaagcgtggcagctccggaagaggaggacaccgatccgcgccgcctcgtgcaacttctgcgccagcactcctcgccctggcaagtctacgggttcgtccgcgcctgcctgcgccgcctggtgccgcctgggctctggggttcccggcataacgagcgccgcttcctgagaaatactaagaagtttatctcacttggaaaacatgccaagttgtcgctgcaagaactcacgtggaagatgtcagtccgcgattgcgcctggctgcgccgctcgccgggcgtcgggtgtgttccagctgcagaacaccgcctgagagaagaaattctggccaaatttctgcattggctgatgtcagtgtacgtggtcgagctgctgcgctcctttttctacgtcactgagactacctttcaaaagaaccgcctgttcttctaccgcaaatctgtgtggagcaagctgcagtcaatcggcattcgccagcatctgaagagggtgcagctgcgggaactttccgaggcagaagtccgccagcaccgggaggcccggccggcgcttctcacgtcgcgtctgagattcatcccaaagcccgacgggctgaggcctatcgtcaacatggattacgtcgtgggcgctcgcacctttcgccgtgaaaagcgggccgaacgcttgacctcacgggtgaaggccctcttctccgtgctgaactacgagagagcaagacggcctggcctgctgggagcttcggtgctgggactggacgatatccaccgggcttggcggacctttgttctccgggtgagagcccaagaccctccgccggaactgtacttcgtgaaggtggcgatcaccggagcctatgatactattccgcaagatcgactcaccgaagtcatcgcctcgatcatcaaaccgcagaacacttactgcgtcaggcggtacgccgtggtccagaaggccgcgcatggccacgtgagaaaggcgttcaagtcgcacgtgtccactctcaccgacctccagccttacatgaggcaattcgttgcgcatttgcaagagacttcgcccctgagagatgcggtggtcatcgagcagagctccagcctgaacgaagcgagcagcggtctgtttgacgtgttcctccgcttcatgtgtcatcacgcggtgcgaatcaggggaaaatcatacgtgcagtgccagggaatcccacaaggcagcattctgtcgactctcttgtgttccctttgctacggcgatatggaaaacaagctgttcgctgggatcagacgggacgggttgctgctcagactggtggacgacttcctgctggtgactccgcacctcactcacgccaaaacctttctccgcactctggtgaggggagtgccagaatacggctgtgtggtcaatctccggaaaactgtggtgaatttccctgtcgaggatgaggcactcggaggaaccgcatttgtccaaatgccagcacatggcctgttcccatggtgcggtctgctgctggacacccgaactcttgaagtgcagtccgactactccagctatgcccggacgagcatccgcgccagcctcactttcaatcgcggctttaaggccggacgaaacatgcgcagaaagcttttcggagtcctccggcttaaatgccattcgctctttctcgatctccaagtcaattcgctgcagaccgtgtgcacgaacatctacaagatcctgctgctccaagcctaccggttccacgcttgcgtgcttcagctgccgtttcaccaacaggtgtggaagaacccgaccttctttctgcgggtcattagcgatactgcctccctgtgttactcaatcctcaaggcaaagaacgccggaatgtcgctgggtgcgaaaggagccgcgggacctcttcctagcgaagcggtgcagtggctctgccaccaggctttcctcctgaagctgaccaggcacagagtgacctacgtcccgctgctgggctcgctgcgcactgcacagacccagctgtctagaaaactccccggcaccaccctgaccgctctggaagccgccgccaacccagcattgccgtcagatttcaagaccatcttggacggatccggcacaatcctgtctgagggcgccaccaacttcagcctgctgaaactggccggcgacgtggaactgaaccctggccctacaggctctggccacgccagctctacacctggcggcgagaaagagacaagcgccacccagagaagcagcgtgccaagcagcaccgagaagaacgccgtgtccatgaccagctccgtgctgagcagccactctcctggcagcggcagcagcacaacacagggccaggatgtgacactggcccctgccacagaacctgcctctggatctgccgccacctggggacaggacgtgacaagcgtgccagtgaccagacctgccctgggctctacaacaccccctgcccacgatgtgaccagcgcccctgataacaagcctgcccctggaagcacagcccctccagctcatggcgtgacctctgccccagataccagaccagccccaggatctacagccccacccgcacacggcgtgacaagtgcccctgacacaagacccgctccaggctctactgctcctcctgcccatggcgtgacaagcgctcccgatacaaggccagctcctggctccacagcaccaccagcacatggcgtgacatcagctcccgacactagacctgctcccggatcaaccgctccaccagctcacggcgtgaccagcgcacctgataccagacctgctctgggaagcaccgcccctcccgtgcacaatgtgacatctgcttccggcagcgccagcggctctgcctctacactggtgcacaacggcaccagcgccagagccacaacaaccccagccagcaagagcacccccttcagcatccctagccaccacagcgacacccctaccacactggccagccactccaccaagaccgatgcctctagcacccaccactccagcgtgccccctctgaccagcagcaaccacagcacaagcccccagctgtctaccggcgtctcattcttctttctgtccttccacatcagcaacctgcagttcaacagcagcctggaagatcccagcaccgactactaccaggaactgcagcgggatatcagcgagatgttcctgcaaatctacaagcagggcggcttcctgggcctgagcaacatcaagttcagacccggcagcgtggtggtgcagctgaccctggctttccgggaaggcaccatcaacgtgcacgacgtggaaacccagttcaaccagtacaagaccgaggccgccagccggtacaacctgaccatctccgatgtgtccgtgtccgacgtgcccttcccattctctgcccagtctggcgcaggcgtgccaggatggggaattgctctgctggtgctcgtgtgcgtgctggtggccctggccatcgtgtatctgattgccctggccgtgtgccagtgccggcggaagaattacggccagctggacatcttccccgccagagacacctaccaccccatgagcgagtaccccacataccacacccacggcagatacgtgccacccagctccaccgacagatccccctacgagaaagtgtctgccggcaacggcggcagctccctgagctacacaaatcctgccgtggccgctgcctccgccaacctg

SEQ ID NO: 34 - protein, 1437 aa, Artificial Sequence
  Synthetic Construct
MASGAAPEPERTPVGQGSWAHPGRTRGPSDRGFCVVSPARPAEEATSLEGALSGTRHSHPSVGRQHHAGPPSTSRPPRPWDTPCPPVYAETKHFLYSSGDKEQLRPSFLLSSLRPSLTGARRLVETIFLGSRPWMPGTPRRLPRLPQRYWQMRPLFLELLGNHAQCPYGVLLKTHCPLRAAVTPAAGVCAREKPQGSVAAPEEEDTDPRRLVQLLRQHSSPWQVYGFVRACLRRLVPPGLWGSRHNERRFLRNTKKFISLGKHAKLSLQELTWKMSVRDCAWLRRSPGVGCVPAAEHRLREEILAKFLHWLMSVYVVELLRSFFYVTETTFQKNRLFFYRKSVWSKLQSIGIRQHLKRVQLRELSEAEVRQHREARPALLTSRLRFIPKPDGLRPIVNMDYVVGARTFRREKRAERLTSRVKALFSVLNYERARRPGLLGASVLGLDDIHRAWRTFVLRVRAQDPPPELYFVKVAITGAYDTIPQDRLTEVIASIIKPQNTYCVRRYAVVQKAAHGHVRKAFKSHVSTLTDLQPYMRQFVAHLQETSPLRDAVVIEQSSSLNEASSGLFDVFLRFMCHHAVRIRGKSYVQCQGIPQGSILSTLLCSLCYGDMENKLFAGIRRDGLLLRLVDDFLLVTPHLTHAKTFLRTLVRGVPEYGCVVNLRKTVVNFPVEDEALGGTAFVQMPAHGLFPWCGLLLDTRTLEVQSDYSSYARTSIRASLTFNRGFKAGRNMRRKLFGVLRLKCHSLFLDLQVNSLQTVCTNIYKILLLQAYRFHACVLQLPFHQQVWKNPTFFLRVISDTASLCYSILKAKNAGMSLGAKGAAGPLPSEAVQWLCHQAFLLKLTRHRVTYVPLLGSLRTAQTQLSRKLPGTTLTALEAAANPALPSDFKTILDGSGTILSEGATNFSLLKLAGDVELNPGPTGSGHASSTPGGEKETSATQRSSVPSSTEKNAVSMTSSVLSSHSPGSGSSTTQGQDVTLAPATEPASGSAATWGQDVTSVPVTRPALGSTTPPAHDVTSAPDNKPAPGSTAPPAHGVTSAPDTRPAPGSTAPPAHGVTSAPDTRPAPGSTAPPAHGVTSAPDTRPAPGSTAPPAHGVTSAPDTRPAPGSTAPPAHGVTSAPDTRPALGSTAPPVHNVTSASGSASGSASTLVHNGTSARATTTPASKSTPFSIPSHHSDTPTTLASHSTKTDASSTHHSSVPPLTSSNHSTSPQLSTGVSFFFLSFHISNLQFNSSLEDPSTDYYQELQRDISEMFLQIYKQGGFLGLSNIKFRPGSVVVQLTLAFREGTINVHDVETQFNQYKTEAASRYNLTISDVSVSDVPFPFSAQSGAGVPGWGIALLVLVCVLVALAIVYLIALAVCQCRRKNYGQLDIFPARDTYHPMSEYPTYHTHGRYVPPSSTDRSPYEKVSAGNGGSSLSYTNPAVAAASANL

SEQ ID NO: 35 - DNA, 4431 bp, Artificial Sequence
  Synthetic Construct
atggctagcggagctgccccggagccggagaggacccccgttggccagggatcgtgggcccatccgggacgcaccaggggaccatccgacaggggattctgtgtggtgtcaccggccaggccagcagaagaggcaaccagcctcgagggagcgttgtctggaaccagacattcccacccgtcggtgggccggcagcaccacgcgggaccaccgtccacttccagaccgccacggccatgggacaccccttgcccgcctgtgtatgccgagactaaacacttcctgtactcatccggagacaaggaacagcttcggccgtccttcctcctgtcgtcgctcagaccgagcctgaccggagcacgcagattggtggaaactatcttccttgggtcacgtccgtggatgccaggtaccccacggcgcctcccgcgcctcccacagagatactggcagatgcggcctctgttcctggaattgctgggaaaccacgctcagtgcccgtacggagtcctgctcaagactcactgccctctgagggcggcggtcactccggcggccggagtgtgcgcacgggagaagccccagggaagcgtggcagctccggaagaggaggacaccgatccgcgccgcctcgtgcaacttctgcgccagcactcctcgccctggcaagtctacgggttcgtccgcgcctgcctgcgccgcctggtgccgcctgggctctggggttcccggcataacgagcgccgcttcctgagaaatactaagaagtttatctcacttggaaaacatgccaagttgtcgctgcaagaactcacgtggaagatgtcagtccgcgattgcgcctggctgcgccgctcgccgggcgtcgggtgtgttccagctgcagaacaccgcctgagagaagaaattctggccaaatttctgcattggctgatgtcagtgtacgtggtcgagctgctgcgctcctttttctacgtcactgagactacctttcaaaagaaccgcctgttcttctaccgcaaatctgtgtggagcaagctgcagtcaatcggcattcgccagcatctgaagagggtgcagctgcgggaactttccgaggcagaagtccgccagcaccgggaggcccggccggcgcttctcacgtcgcgtctgagattcatcccaaagcccgacgggctgaggcctatcgtcaacatggattacgtcgtgggcgctcgcacctttcgccgtgaaaagcgggccgaacgcttgacctcacgggtgaaggccctcttctccgtgctgaactacgagagagcaagacggcctggcctgctgggagcttcggtgctgggactggacgatatccaccgggcttggcggacctttgttctccgggtgagagcccaagaccctccgccggaactgtacttcgtgaaggtggcgatcaccggagcctatgatactattccgcaagatcgactcaccgaagtcatcgcctcgatcatcaaaccgcagaacacttactgcgtcaggcggtacgccgtggtccagaaggccgcgcatggccacgtgagaaaggcgttcaagtcgcacgtgtccactctcaccgacctccagccttacatgaggcaattcgttgcgcatttgcaagagacttcgcccctgagagatgcggtggtcatcgagcagagctccagcctgaacgaagcgagcagcggtctgtttgacgtgttcctccgcttcatgtgtcatcacgcggtgcgaatcaggggaaaatcatacgtgcagtgccagggaatcccacaaggcagcattctgtcgactctcttgtgttccctttgctacggcgatatggaaaacaagctgttcgctgggatcagacgggacgggttgctgctcagactggtggacgacttcctgctggtgactccgcacctcactcacgccaaaacctttctccgcactctggtgaggggagtgccagaatacggctgtgtggtcaatctccggaaaactgtggtgaatttccctgtcgaggatgaggcactcggaggaaccgcatttgtccaaatgccagcacatggcctgttcccatggtgcggtctgctgctggacacccgaactcttgaagtgcagtccgactactccagctatgcccggacgagcatccgcgccagcctcactttcaatcgcggctttaaggccggacgaaacatgcgcagaaagcttttcggagtcctccggcttaaatgccattcgctctttctcgatctccaagtcaattcgctgcagaccgtgtgcacgaacatctacaagatcctgctgctccaagcctaccggttccacgcttgcgtgcttcagctgccgtttcaccaacaggtgtggaagaacccgaccttctttctgcgggtcattagcgatactgcctccctgtgttactcaatcctcaaggcaaagaacgccggaatgtcgctgggtgcgaaaggagccgcgggacctcttcctagcgaagcggtgcagtggctctgccaccaggctttcctcctgaagctgaccaggcacagagtgacctacgtcccgctgctgggctcgctgcgcactgcacagacccagctgtctagaaaactccccggcaccaccctgaccgctctggaagccgccgccaacccagcattgccgtcagatttcaagaccatcttggacggatccggcgagggcagaggcagcctgctgacatgtggcgacgtggaagagaaccctggccccctggctggcgagacaggacaggaagccgctcctctggacggcgtgctggccaaccctcccaatatcagcagcctgagccccagacagctgctgggattcccttgtgccgaggtgtccggcctgagcacagagagagtgcgggaactggctgtggccctggcccagaaaaacgtgaagctgagcaccgagcagctgcggtgcctggcccacagactgtctgagcctcccgaggatctggacgccctgcctctggatctgctgctgttcctgaaccccgacgccttcagcggacctcaggcctgcacccggttcttcagcagaatcaccaaggccaacgtggacctgctgcccagaggcgcccctgagagacagagactgctgcctgctgctctggcctgttggggagtgcggggctctctgctgtctgaagctgatgtgcgggccctgggaggcctggcttgtgatctgcctggaagattcgtggccgagagcgccgaagtgctgctgcctagactggtgtcctgtcccggccctctggaccaggatcagcaggaagctgccagagctgctctgcagggcggaggccctccttatggacctcctagcacttggagcgtgtccaccatggatgccctgaggggcctgctgccagtgctgggccagcctatcatcagatccatcccacagggcatcgtggccgcctggcggcagagaagctctagagatccctcttggcggcagcccgagcggacaatcctgcggcccaggtttcggagagaggtggaaaagaccgcctgcccctctggcaagaaggccagagagatcgacgagagcctgatcttctacaagaagtgggagctggaagcctgcgtggacgccgctctgctggccacccagatggacagagtgaacgccatccccttcacctatgagcagctggacgtgctgaagcacaagctggatgagctgtacccccagggctaccccgagagcgtgatccagcacctgggctacctgtttctgaagatgagccccgaggacatccggaagtggaacgtgaccagcctggaaaccctgaaggccctgctggaagtgaacaagggccacgagatgtccccccaggtggccacactgatcgacagattcgtgaagggcagaggccagctggacaaggacaccctggatacactgaccgccttctaccccggctatctgtgcagcctgtcccccgaggaactgagcagcgtgccacctagctctatctgggctgtgcggccccaggacctggatacctgcgatcctagacagctggatgtgctgtatcccaaggcccggctggccttccagaacatgaacggcagcgagtacttcgtgaagatccagtccttcctgggcggagcccctaccgaggacctgaaagctctgagccagcagaacgtgtccatggatctggccacctttatgaagctgcggaccgacgccgtgctgcctctgacagtggctgaggtgcagaaactgctgggcccccatgtggaagggctgaaggccgaagaacggcacagacccgtgcgcgactggatcctgaggcagagacaggatgacctggacacactgggcctgggactgcaggggggcatccctaatggctacctggtgctggacctgagcatgcaggaagccctg

SEQ ID NO: 36 - protein, 1477 aa, Artificial Sequence
  Synthetic Construct
MASGAAPEPERTPVGQGSWAHPGRTRGPSDRGFCVVSPARPAEEATSLEGALSGTRHSHPSVGRQHHAGPPSTSRPPRPWDTPCPPVYAETKHFLYSSGDKEQLRPSFLLSSLRPSLTGARRLVETIFLGSRPWMPGTPRRLPRLPQRYWQMRPLFLELLGNHAQCPYGVLLKTHCPLRAAVTPAAGVCAREKPQGSVAAPEEEDTDPRRLVQLLRQHSSPWQVYGFVRACLRRLVPPGLWGSRHNERRFLRNTKKFISLGKHAKLSLQELTWKMSVRDCAWLRRSPGVGCVPAAEHRLREEILAKFLHWLMSVYVVELLRSFFYVTETTFQKNRLFFYRKSVWSKLQSIGIRQHLKRVQLRELSEAEVRQHREARPALLTSRLRFIPKPDGLRPIVNMDYVVGARTFRREKRAERLTSRVKALFSVLNYERARRPGLLGASVLGLDDIHRAWRTFVLRVRAQDPPPELYFVKVAITGAYDTIPQDRLTEVIASIIKPQNTYCVRRYAVVQKAAHGHVRKAFKSHVSTLTDLQPYMRQFVAHLQETSPLRDAVVIEQSSSLNEASSGLFDVFLRFMCHHAVRIRGKSYVQCQGIPQGSILSTLLCSLCYGDMENKLFAGIRRDGLLLRLVDDFLLVTPHLTHAKTFLRTLVRGVPEYGCVVNLRKTVVNFPVEDEALGGTAFVQMPAHGLFPWCGLLLDTRTLEVQSDYSSYARTSIRASLTFNRGFKAGRNMRRKLFGVLRLKCHSLFLDLQVNSLQTVCTNIYKILLLQAYRFHACVLQLPFHQQVWKNPTFFLRVISDTASLCYSILKAKNAGMSLGAKGAAGPLPSEAVQWLCHQAFLLKLTRHRVTYVPLLGSLRTAQTQLSRKLPGTTLTALEAAANPALPSDFKTILDGSGEGRGSLLTCGDVEENPGPLAGETGQEAAPLDGVLANPPNISSLSPRQLLGFPCAEVSGLSTERVRELAVALAQKNVKLSTEQLRCLAHRLSEPPEDLDALPLDLLLFLNPDAFSGPQACTRFFSRITKANVDLLPRGAPERQRLLPAALACWGVRGSLLSEADVRALGGLACDLPGRFVAESAEVLLPRLVSCPGPLDQDQQEAARAALQGGGPPYGPPSTWSVSTMDALRGLLPVLGQPIIRSIPQGIVAAWRQRSSRDPSWRQPERTILRPRFRREVEKTACPSGKKAREIDESLIFYKKWELEACVDAALLATQMDRVNAIPFTYEQLDVLKHKLDELYPQGYPESVIQHLGYLFLKMSPEDIRKWNVTSLETLKALLEVNKGHEMSPQVATLIDRFVKGRGQLDKDTLDTLTAFYPGYLCSLSPEELSSVPPSSIWAVRPQDLDTCDPRQLDVLYPKARLAFQNMNGSEYFVKIQSFLGGAPTEDLKALSQQNVSMDLATFMKLRTDAVLPLTVAEVQKLLGPHVEGLKAEERHRPVRDWILRQRQDDLDTLGLGLQGGIPNGYLVLDLSMQEAL

SEQ ID NO: 37 - DNA, 4383 bp, Artificial Sequence
  Synthetic Construct
atggctagcggagctgccccggagccggagaggacccccgttggccagggatcgtgggcccatccgggacgcaccaggggaccatccgacaggggattctgtgtggtgtcaccggccaggccagcagaagaggcaaccagcctcgagggagcgttgtctggaaccagacattcccacccgtcggtgggccggcagcaccacgcgggaccaccgtccacttccagaccgccacggccatgggacaccccttgcccgcctgtgtatgccgagactaaacacttcctgtactcatccggagacaaggaacagcttcggccgtccttcctcctgtcgtcgctcagaccgagcctgaccggagcacgcagattggtggaaactatcttccttgggtcacgtccgtggatgccaggtaccccacggcgcctcccgcgcctcccacagagatactggcagatgcggcctctgttcctggaattgctgggaaaccacgctcagtgcccgtacggagtcctgctcaagactcactgccctctgagggcggcggtcactccggcggccggagtgtgcgcacgggagaagccccagggaagcgtggcagctccggaagaggaggacaccgatccgcgccgcctcgtgcaacttctgcgccagcactcctcgccctggcaagtctacgggttcgtccgcgcctgcctgcgccgcctggtgccgcctgggctctggggttcccggcataacgagcgccgcttcctgagaaatactaagaagtttatctcacttggaaaacatgccaagttgtcgctgcaagaactcacgtggaagatgtcagtccgcgattgcgcctggctgcgccgctcgccgggcgtcgggtgtgttccagctgcagaacaccgcctgagagaagaaattctggccaaatttctgcattggctgatgtcagtgtacgtggtcgagctgctgcgctcctttttctacgtcactgagactacctttcaaaagaaccgcctgttcttctaccgcaaatctgtgtggagcaagctgcagtcaatcggcattcgccagcatctgaagagggtgcagctgcgggaactttccgaggcagaagtccgccagcaccgggaggcccggccggcgcttctcacgtcgcgtctgagattcatcccaaagcccgacgggctgaggcctatcgtcaacatggattacgtcgtgggcgctcgcacctttcgccgtgaaaagcgggccgaacgcttgacctcacgggtgaaggccctcttctccgtgctgaactacgagagagcaagacggcctggcctgctgggagcttcggtgctgggactggacgatatccaccgggcttggcggacctttgttctccgggtgagagcccaagaccctccgccggaactgtacttcgtgaaggtggcgatcaccggagcctatgatactattccgcaagatcgactcaccgaagtcatcgcctcgatcatcaaaccgcagaacacttactgcgtcaggcggtacgccgtggtccagaaggccgcgcatggccacgtgagaaaggcgttcaagtcgcacgtgtccactctcaccgacctccagccttacatgaggcaattcgttgcgcatttgcaagagacttcgcccctgagagatgcggtggtcatcgagcagagctccagcctgaacgaagcgagcagcggtctgtttgacgtgttcctccgcttcatgtgtcatcacgcggtgcgaatcaggggaaaatcatacgtgcagtgccagggaatcccacaaggcagcattctgtcgactctcttgtgttccctttgctacggcgatatggaaaacaagctgttcgctgggatcagacgggacgggttgctgctcagactggtggacgacttcctgctggtgactccgcacctcactcacgccaaaacctttctccgcactctggtgaggggagtgccagaatacggctgtgtggtcaatctccggaaaactgtggtgaatttccctgtcgaggatgaggcactcggaggaaccgcatttgtccaaatgccagcacatggcctgttcccatggtgcggtctgctgctggacacccgaactcttgaagtgcagtccgactactccagctatgcccggacgagcatccgcgccagcctcactttcaatcgcggctttaaggccggacgaaacatgcgcagaaagcttttcggagtcctccggcttaaatgccattcgctctttctcgatctccaagtcaattcgctgcagaccgtgtgcacgaacatctacaagatcctgctgctccaagcctaccggttccacgcttgcgtgcttcagctgccgtttcaccaacaggtgtggaagaacccgaccttctttctgcgggtcattagcgatactgcctccctgtgttactcaatcctcaaggcaaagaacgccggaatgtcgctgggtgcgaaaggagccgcgggacctcttcctagcgaagcggtgcagtggctctgccaccaggctttcctcctgaagctgaccaggcacagagtgacctacgtcccgctgctgggctcgctgcgcactgcacagacccagctgtctagaaaactccccggcaccaccctgaccgctctggaagccgccgccaacccagcattgccgtcagatttcaagaccatcttggacggaggctccggcggactggctggcgagacaggacaggaagccgctcctctggacggcgtgctggccaaccctcccaatatcagcagcctgagccccagacagctgctgggattcccttgtgccgaggtgtccggcctgagcacagagagagtgcgggaactggctgtggccctggcccagaaaaacgtgaagctgagcaccgagcagctgcggtgcctggcccacagactgtctgagcctcccgaggatctggacgccctgcctctggatctgctgctgttcctgaaccccgacgccttcagcggacctcaggcctgcacccggttcttcagcagaatcaccaaggccaacgtggacctgctgcccagaggcgcccctgagagacagagactgctgcctgctgctctggcctgttggggagtgcggggctctctgctgtctgaagctgatgtgcgggccctgggaggcctggcttgtgatctgcctggaagattcgtggccgagagcgccgaagtgctgctgcctagactggtgtcctgtcccggccctctggaccaggatcagcaggaagctgccagagctgctctgcagggcggaggccctccttatggacctcctagcacttggagcgtgtccaccatggatgccctgaggggcctgctgccagtgctgggccagcctatcatcagatccatcccacagggcatcgtggccgcctggcggcagagaagctctagagatccctcttggcggcagcccgagcggacaatcctgcggcccaggtttcggagagaggtggaaaagaccgcctgcccctctggcaagaaggccagagagatcgacgagagcctgatcttctacaagaagtgggagctggaagcctgcgtggacgccgctctgctggccacccagatggacagagtgaacgccatccccttcacctatgagcagctggacgtgctgaagcacaagctggatgagctgtacccccagggctaccccgagagcgtgatccagcacctgggctacctgtttctgaagatgagccccgaggacatccggaagtggaacgtgaccagcctggaaaccctgaaggccctgctggaagtgaacaagggccacgagatgtccccccaggtggccacactgatcgacagattcgtgaagggcagaggccagctggacaaggacaccctggatacactgaccgccttctaccccggctatctgtgcagcctgtcccccgaggaactgagcagcgtgccacctagctctatctgggctgtgcggccccaggacctggatacctgcgatcctagacagctggatgtgctgtatcccaaggcccggctggccttccagaacatgaacggcagcgagtacttcgtgaagatccagtccttcctgggcggagcccctaccgaggacctgaaagctctgagccagcagaacgtgtccatggatctggccacctttatgaagctgcggaccgacgccgtgctgcctctgacagtggctgaggtgcagaaactgctgggcccccatgtggaagggctgaaggccgaagaacggcacagacccgtgcgcgactggatcctgaggcagagacaggatgacctggacacactgggcctgggactgcaggggggcatccctaatggctacctggtgctggacctgagcatgcaggaagccctg

SEQ ID NO: 38 - protein, 1461 aa, Artificial Sequence
  Synthetic Construct
MASGAAPEPERTPVGQGSWAHPGRTRGPSDRGFCVVSPARPAEEATSLEGALSGTRHSHPSVGRQHHAGPPSTSRPPRPWDTPCPPVYAETKHFLYSSGDKEQLRPSFLLSSLRPSLTGARRLVETIFLGSRPWMPGTPRRLPRLPQRYWQMRPLFLELLGNHAQCPYGVLLKTHCPLRAAVTPAAGVCAREKPQGSVAAPEEEDTDPRRLVQLLRQHSSPWQVYGFVRACLRRLVPPGLWGSRHNERRFLRNTKKFISLGKHAKLSLQELTWKMSVRDCAWLRRSPGVGCVPAAEHRLREEILAKFLHWLMSVYVVELLRSFFYVTETTFQKNRLFFYRKSVWSKLQSIGIRQHLKRVQLRELSEAEVRQHREARPALLTSRLRFIPKPDGLRPIVNMDYVVGARTFRREKRAERLTSRVKALFSVLNYERARRPGLLGASVLGLDDIHRAWRTFVLRVRAQDPPPELYFVKVAITGAYDTIPQDRLTEVIASIIKPQNTYCVRRYAVVQKAAHGHVRKAFKSHVSTLTDLQPYMRQFVAHLQETSPLRDAVVIEQSSSLNEASSGLFDVFLRFMCHHAVRIRGKSYVQCQGIPQGSILSTLLCSLCYGDMENKLFAGIRRDGLLLRLVDDFLLVTPHLTHAKTFLRTLVRGVPEYGCVVNLRKTVVNFPVEDEALGGTAFVQMPAHGLFPWCGLLLDTRTLEVQSDYSSYARTSIRASLTFNRGFKAGRNMRRKLFGVLRLKCHSLFLDLQVNSLQTVCTNIYKILLLQAYRFHACVLQLPFHQQVWKNPTFFLRVISDTASLCYSILKAKNAGMSLGAKGAAGPLPSEAVQWLCHQAFLLKLTRHRVTYVPLLGSLRTAQTQLSRKLPGTTLTALEAAANPALPSDFKTILDGGSGGLAGETGQEAAPLDGVLANPPNISSLSPRQLLGFPCAEVSGLSTERVRELAVALAQKNVKLSTEQLRCLAHRLSEPPEDLDALPLDLLLFLNPDAFSGPQACTRFFSRITKANVDLLPRGAPERQRLLPAALACWGVRGSLLSEADVRALGGLACDLPGRFVAESAEVLLPRLVSCPGPLDQDQQEAARAALQGGGPPYGPPSTWSVSTMDALRGLLPVLGQPIIRSIPQGIVAAWRQRSSRDPSWRQPERTILRPRFRREVEKTACPSGKKAREIDESLIFYKKWELEACVDAALLATQMDRVNAIPFTYEQLDVLKHKLDELYPQGYPESVIQHLGYLFLKMSPEDIRKWNVTSLETLKALLEVNKGHEMSPQVATLIDRFVKGRGQLDKDTLDTLTAFYPGYLCSLSPEELSSVPPSSIWAVRPQDLDTCDPRQLDVLYPKARLAFQNMNGSEYFVKIQSFLGGAPTEDLKALSQQNVSMDLATFMKLRTDAVLPLTVAEVQKLLGPHVEGLKAEERHRPVRDWILRQRQDDLDTLGLGLQGGIPNGYLVLDLSMQEAL

SEQ ID NO: 39 - DNA, 4431 bp, Artificial Sequence
  Synthetic Construct
atggctagcctggctggcgagacaggacaggaagccgctcctctggacggcgtgctggccaaccctcccaatatcagcagcctgagccccagacagctgctgggattcccttgtgccgaggtgtccggcctgagcacagagagagtgcgggaactggctgtggccctggcccagaaaaacgtgaagctgagcaccgagcagctgcggtgcctggcccacagactgtctgagcctcccgaggatctggacgccctgcctctggatctgctgctgttcctgaaccccgacgccttcagcggacctcaggcctgcacccggttcttcagcagaatcaccaaggccaacgtggacctgctgcccagaggcgcccctgagagacagagactgctgcctgctgctctggcctgttggggagtgcggggctctctgctgtctgaagctgatgtgcgggccctgggaggcctggcttgtgatctgcctggaagattcgtggccgagagcgccgaagtgctgctgcctagactggtgtcctgtcccggccctctggaccaggatcagcaggaagctgccagagctgctctgcagggcggaggccctccttatggacctcctagcacttggagcgtgtccaccatggatgccctgaggggcctgctgccagtgctgggccagcctatcatcagatccatcccacagggcatcgtggccgcctggcggcagagaagctctagagatccctcttggcggcagcccgagcggacaatcctgcggcccaggtttcggagagaggtggaaaagaccgcctgcccctctggcaagaaggccagagagatcgacgagagcctgatcttctacaagaagtgggagctggaagcctgcgtggacgccgctctgctggccacccagatggacagagtgaacgccatccccttcacctatgagcagctggacgtgctgaagcacaagctggatgagctgtacccccagggctaccccgagagcgtgatccagcacctgggctacctgtttctgaagatgagccccgaggacatccggaagtggaacgtgaccagcctggaaaccctgaaggccctgctggaagtgaacaagggccacgagatgtccccccaggtggccacactgatcgacagattcgtgaagggcagaggccagctggacaaggacaccctggatacactgaccgccttctaccccggctatctgtgcagcctgtcccccgaggaactgagcagcgtgccacctagctctatctgggctgtgcggccccaggacctggatacctgcgatcctagacagctggatgtgctgtatcccaaggcccggctggccttccagaacatgaacggcagcgagtacttcgtgaagatccagtccttcctgggcggagcccctaccgaggacctgaaagctctgagccagcagaacgtgtccatggatctggccacctttatgaagctgcggaccgacgccgtgctgcctctgacagtggctgaggtgcagaaactgctgggcccccatgtggaagggctgaaggccgaagaacggcacagacccgtgcgcgactggatcctgaggcagagacaggatgacctggacacactgggcctgggactgcaggggggcatccctaatggctacctggtgctggacctgagcatgcaggaagccctgggatccggcgagggcagaggcagcctgctgacatgtggcgacgtggaagagaaccctggccccggagctgccccggagccggagaggacccccgttggccagggatcgtgggcccatccgggacgcaccaggggaccatccgacaggggattctgtgtggtgtcaccggccaggccagcagaagaggcaaccagcctcgagggagcgttgtctggaaccagacattcccacccgtcggtgggccggcagcaccacgcgggaccaccgtccacttccagaccgccacggccatgggacaccccttgcccgcctgtgtatgccgagactaaacacttcctgtactcatccggagacaaggaacagcttcggccgtccttcctcctgtcgtcgctcagaccgagcctgaccggagcacgcagattggtggaaactatcttccttgggtcacgtccgtggatgccaggtaccccacggcgcctcccgcgcctcccacagagatactggcagatgcggcctctgttcctggaattgctgggaaaccacgctcagtgcccgtacggagtcctgctcaagactcactgccctctgagggcggcggtcactccggcggccggagtgtgcgcacgggagaagccccagggaagcgtggcagctccggaagaggaggacaccgatccgcgccgcctcgtgcaacttctgcgccagcactcctcgccctggcaagtctacgggttcgtccgcgcctgcctgcgccgcctggtgccgcctgggctctggggttcccggcataacgagcgccgcttcctgagaaatactaagaagtttatctcacttggaaaacatgccaagttgtcgctgcaagaactcacgtggaagatgtcagtccgcgattgcgcctggctgcgccgctcgccgggcgtcgggtgtgttccagctgcagaacaccgcctgagagaagaaattctggccaaatttctgcattggctgatgtcagtgtacgtggtcgagctgctgcgctcctttttctacgtcactgagactacctttcaaaagaaccgcctgttcttctaccgcaaatctgtgtggagcaagctgcagtcaatcggcattcgccagcatctgaagagggtgcagctgcgggaactttccgaggcagaagtccgccagcaccgggaggcccggccggcgcttctcacgtcgcgtctgagattcatcccaaagcccgacgggctgaggcctatcgtcaacatggattacgtcgtgggcgctcgcacctttcgccgtgaaaagcgggccgaacgcttgacctcacgggtgaaggccctcttctccgtgctgaactacgagagagcaagacggcctggcctgctgggagcttcggtgctgggactggacgatatccaccgggcttggcggacctttgttctccgggtgagagcccaagaccctccgccggaactgtacttcgtgaaggtggcgatcaccggagcctatgatactattccgcaagatcgactcaccgaagtcatcgcctcgatcatcaaaccgcagaacacttactgcgtcaggcggtacgccgtggtccagaaggccgcgcatggccacgtgagaaaggcgttcaagtcgcacgtgtccactctcaccgacctccagccttacatgaggcaattcgttgcgcatttgcaagagacttcgcccctgagagatgcggtggtcatcgagcagagctccagcctgaacgaagcgagcagcggtctgtttgacgtgttcctccgcttcatgtgtcatcacgcggtgcgaatcaggggaaaatcatacgtgcagtgccagggaatcccacaaggcagcattctgtcgactctcttgtgttccctttgctacggcgatatggaaaacaagctgttcgctgggatcagacgggacgggttgctgctcagactggtggacgacttcctgctggtgactccgcacctcactcacgccaaaacctttctccgcactctggtgaggggagtgccagaatacggctgtgtggtcaatctccggaaaactgtggtgaatttccctgtcgaggatgaggcactcggaggaaccgcatttgtccaaatgccagcacatggcctgttcccatggtgcggtctgctgctggacacccgaactcttgaagtgcagtccgactactccagctatgcccggacgagcatccgcgccagcctcactttcaatcgcggctttaaggccggacgaaacatgcgcagaaagcttttcggagtcctccggcttaaatgccattcgctctttctcgatctccaagtcaattcgctgcagaccgtgtgcacgaacatctacaagatcctgctgctccaagcctaccggttccacgcttgcgtgcttcagctgccgtttcaccaacaggtgtggaagaacccgaccttctttctgcgggtcattagcgatactgcctccctgtgttactcaatcctcaaggcaaagaacgccggaatgtcgctgggtgcgaaaggagccgcgggacctcttcctagcgaagcggtgcagtggctctgccaccaggctttcctcctgaagctgaccaggcacagagtgacctacgtcccgctgctgggctcgctgcgcactgcacagacccagctgtctagaaaactccccggcaccaccctgaccgctctggaagccgccgccaacccagcattgccgtcagatttcaagaccatcttggac

SEQ ID NO: 40 - protein, 1477 aa, Artificial Sequence
  Synthetic Construct
MASLAGETGQEAAPLDGVLANPPNISSLSPRQLLGFPCAEVSGLSTERVRELAVALAQKNVKLSTEQLRCLAHRLSEPPEDLDALPLDLLLFLNPDAFSGPQACTRFFSRITKANVDLLPRGAPERQRLLPAALACWGVRGSLLSEADVRALGGLACDLPGRFVAESAEVLLPRLVSCPGPLDQDQQEAARAALQGGGPPYGPPSTWSVSTMDALRGLLPVLGQPIIRSIPQGIVAAWRQRSSRDPSWRQPERTILRPRFRREVEKTACPSGKKAREIDESLIFYKKWELEACVDAALLATQMDRVNAIPFTYEQLDVLKHKLDELYPQGYPESVIQHLGYLFLKMSPEDIRKWNVTSLETLKALLEVNKGHEMSPQVATLIDRFVKGRGQLDKDTLDTLTAFYPGYLCSLSPEELSSVPPSSIWAVRPQDLDTCDPRQLDVLYPKARLAFQNMNGSEYFVKIQSFLGGAPTEDLKALSQQNVSMDLATFMKLRTDAVLPLTVAEVQKLLGPHVEGLKAEERHRPVRDWILRQRQDDLDTLGLGLQGGIPNGYLVLDLSMQEALGSGEGRGSLLTCGDVEENPGPGAAPEPERTPVGQGSWAHPGRTRGPSDRGFCVVSPARPAEEATSLEGALSGTRHSHPSVGRQHHAGPPSTSRPPRPWDTPCPPVYAETKHFLYSSGDKEQLRPSFLLSSLRPSLTGARRLVETIFLGSRPWMPGTPRRLPRLPQRYWQMRPLFLELLGNHAQCPYGVLLKTHCPLRAAVTPAAGVCAREKPQGSVAAPEEEDTDPRRLVQLLRQHSSPWQVYGFVRACLRRLVPPGLWGSRHNERRFLRNTKKFISLGKHAKLSLQELTWKMSVRDCAWLRRSPGVGCVPAAEHRLREEILAKFLHWLMSVYVVELLRSFFYVTETTFQKNRLFFYRKSVWSKLQSIGIRQHLKRVQLRELSEAEVRQHREARPALLTSRLRFIPKPDGLRPIVNMDYVVGARTFRREKRAERLTSRVKALFSVLNYERARRPGLLGASVLGLDDIHRAWRTFVLRVRAQDPPPELYFVKVAITGAYDTIPQDRLTEVIASIIKPQNTYCVRRYAVVQKAAHGHVRKAFKSHVSTLTDLQPYMRQFVAHLQETSPLRDAVVIEQSSSLNEASSGLFDVFLRFMCHHAVRIRGKSYVQCQGIPQGSILSTLLCSLCYGDMENKLFAGIRRDGLLLRLVDDFLLVTPHLTHAKTFLRTLVRGVPEYGCVVNLRKTVVNFPVEDEALGGTAFVQMPAHGLFPWCGLLLDTRTLEVQSDYSSYARTSIRASLTFNRGFKAGRNMRRKLFGVLRLKCHSLFLDLQVNSLQTVCTNIYKILLLQAYRFHACVLQLPFHQQVWKNPTFFLRVISDTASLCYSILKAKNAGMSLGAKGAAGPLPSEAVQWLCHQAFLLKLTRHRVTYVPLLGSLRTAQTQLSRKLPGTTLTALEAAANPALPSDFKTILD

SEQ ID NO: 41 - DNA, 4383 bp, Artificial Sequence
  Synthetic Construct
atggctagcctggctggcgagacaggacaggaagccgctcctctggacggcgtgctggccaaccctcccaatatcagcagcctgagccccagacagctgctgggattcccttgtgccgaggtgtccggcctgagcacagagagagtgcgggaactggctgtggccctggcccagaaaaacgtgaagctgagcaccgagcagctgcggtgcctggcccacagactgtctgagcctcccgaggatctggacgccctgcctctggatctgctgctgttcctgaaccccgacgccttcagcggacctcaggcctgcacccggttcttcagcagaatcaccaaggccaacgtggacctgctgcccagaggcgcccctgagagacagagactgctgcctgctgctctggcctgttggggagtgcggggctctctgctgtctgaagctgatgtgcgggccctgggaggcctggcttgtgatctgcctggaagattcgtggccgagagcgccgaagtgctgctgcctagactggtgtcctgtcccggccctctggaccaggatcagcaggaagctgccagagctgctctgcagggcggaggccctccttatggacctcctagcacttggagcgtgtccaccatggatgccctgaggggcctgctgccagtgctgggccagcctatcatcagatccatcccacagggcatcgtggccgcctggcggcagagaagctctagagatccctcttggcggcagcccgagcggacaatcctgcggcccaggtttcggagagaggtggaaaagaccgcctgcccctctggcaagaaggccagagagatcgacgagagcctgatcttctacaagaagtgggagctggaagcctgcgtggacgccgctctgctggccacccagatggacagagtgaacgccatccccttcacctatgagcagctggacgtgctgaagcacaagctggatgagctgtacccccagggctaccccgagagcgtgatccagcacctgggctacctgtttctgaagatgagccccgaggacatccggaagtggaacgtgaccagcctggaaaccctgaaggccctgctggaagtgaacaagggccacgagatgtccccccaggtggccacactgatcgacagattcgtgaagggcagaggccagctggacaaggacaccctggatacactgaccgccttctaccccggctatctgtgcagcctgtcccccgaggaactgagcagcgtgccacctagctctatctgggctgtgcggccccaggacctggatacctgcgatcctagacagctggatgtgctgtatcccaaggcccggctggccttccagaacatgaacggcagcgagtacttcgtgaagatccagtccttcctgggcggagcccctaccgaggacctgaaagctctgagccagcagaacgtgtccatggatctggccacctttatgaagctgcggaccgacgccgtgctgcctctgacagtggctgaggtgcagaaactgctgggcccccatgtggaagggctgaaggccgaagaacggcacagacccgtgcgcgactggatcctgaggcagagacaggatgacctggacacactgggcctgggactgcaggggggcatccctaatggctacctggtgctggacctgagcatgcaggaagccctgggaggctccggcggaggagctgccccggagccggagaggacccccgttggccagggatcgtgggcccatccgggacgcaccaggggaccatccgacaggggattctgtgtggtgtcaccggccaggccagcagaagaggcaaccagcctcgagggagcgttgtctggaaccagacattcccacccgtcggtgggccggcagcaccacgcgggaccaccgtccacttccagaccgccacggccatgggacaccccttgcccgcctgtgtatgccgagactaaacacttcctgtactcatccggagacaaggaacagcttcggccgtccttcctcctgtcgtcgctcagaccgagcctgaccggagcacgcagattggtggaaactatcttccttgggtcacgtccgtggatgccaggtaccccacggcgcctcccgcgcctcccacagagatactggcagatgcggcctctgttcctggaattgctgggaaaccacgctcagtgcccgtacggagtcctgctcaagactcactgccctctgagggcggcggtcactccggcggccggagtgtgcgcacgggagaagccccagggaagcgtggcagctccggaagaggaggacaccgatccgcgccgcctcgtgcaacttctgcgccagcactcctcgccctggcaagtctacgggttcgtccgcgcctgcctgcgccgcctggtgccgcctgggctctggggttcccggcataacgagcgccgcttcctgagaaatactaagaagtttatctcacttggaaaacatgccaagttgtcgctgcaagaactcacgtggaagatgtcagtccgcgattgcgcctggctgcgccgctcgccgggcgtcgggtgtgttccagctgcagaacaccgcctgagagaagaaattctggccaaatttctgcattggctgatgtcagtgtacgtggtcgagctgctgcgctcctttttctacgtcactgagactacctttcaaaagaaccgcctgttcttctaccgcaaatctgtgtggagcaagctgcagtcaatcggcattcgccagcatctgaagagggtgcagctgcgggaactttccgaggcagaagtccgccagcaccgggaggcccggccggcgcttctcacgtcgcgtctgagattcatcccaaagcccgacgggctgaggcctatcgtcaacatggattacgtcgtgggcgctcgcacctttcgccgtgaaaagcgggccgaacgcttgacctcacgggtgaaggccctcttctccgtgctgaactacgagagagcaagacggcctggcctgctgggagcttcggtgctgggactggacgatatccaccgggcttggcggacctttgttctccgggtgagagcccaagaccctccgccggaactgtacttcgtgaaggtggcgatcaccggagcctatgatactattccgcaagatcgactcaccgaagtcatcgcctcgatcatcaaaccgcagaacacttactgcgtcaggcggtacgccgtggtccagaaggccgcgcatggccacgtgagaaaggcgttcaagtcgcacgtgtccactctcaccgacctccagccttacatgaggcaattcgttgcgcatttgcaagagacttcgcccctgagagatgcggtggtcatcgagcagagctccagcctgaacgaagcgagcagcggtctgtttgacgtgttcctccgcttcatgtgtcatcacgcggtgcgaatcaggggaaaatcatacgtgcagtgccagggaatcccacaaggcagcattctgtcgactctcttgtgttccctttgctacggcgatatggaaaacaagctgttcgctgggatcagacgggacgggttgctgctcagactggtggacgacttcctgctggtgactccgcacctcactcacgccaaaacctttctccgcactctggtgaggggagtgccagaatacggctgtgtggtcaatctccggaaaactgtggtgaatttccctgtcgaggatgaggcactcggaggaaccgcatttgtccaaatgccagcacatggcctgttcccatggtgcggtctgctgctggacacccgaactcttgaagtgcagtccgactactccagctatgcccggacgagcatccgcgccagcctcactttcaatcgcggctttaaggccggacgaaacatgcgcagaaagcttttcggagtcctccggcttaaatgccattcgctctttctcgatctccaagtcaattcgctgcagaccgtgtgcacgaacatctacaagatcctgctgctccaagcctaccggttccacgcttgcgtgcttcagctgccgtttcaccaacaggtgtggaagaacccgaccttctttctgcgggtcattagcgatactgcctccctgtgttactcaatcctcaaggcaaagaacgccggaatgtcgctgggtgcgaaaggagccgcgggacctcttcctagcgaagcggtgcagtggctctgccaccaggctttcctcctgaagctgaccaggcacagagtgacctacgtcccgctgctgggctcgctgcgcactgcacagacccagctgtctagaaaactccccggcaccaccctgaccgctctggaagccgccgccaacccagcattgccgtcagatttcaagaccatcttggac

SEQ ID NO: 42 - protein, 1461 aa, Artificial Sequence
  Synthetic Construct
MASLAGETGQEAAPLDGVLANPPNISSLSPRQLLGFPCAEVSGLSTERVRELAVALAQKNVKLSTEQLRCLAHRLSEPPEDLDALPLDLLLFLNPDAFSGPQACTRFFSRITKANVDLLPRGAPERQRLLPAALACWGVRGSLLSEADVRALGGLACDLPGRFVAESAEVLLPRLVSCPGPLDQDQQEAARAALQGGGPPYGPPSTWSVSTMDALRGLLPVLGQPIIRSIPQGIVAAWRQRSSRDPSWRQPERTILRPRFRREVEKTACPSGKKAREIDESLIFYKKWELEACVDAALLATQMDRVNAIPFTYEQLDVLKHKLDELYPQGYPESVIQHLGYLFLKMSPEDIRKWNVTSLETLKALLEVNKGHEMSPQVATLIDRFVKGRGQLDKDTLDTLTAFYPGYLCSLSPEELSSVPPSSIWAVRPQDLDTCDPRQLDVLYPKARLAFQNMNGSEYFVKIQSFLGGAPTEDLKALSQQNVSMDLATFMKLRTDAVLPLTVAEVQKLLGPHVEGLKAEERHRPVRDWILRQRQDDLDTLGLGLQGGIPNGYLVLDLSMQEALGGSGGGAAPEPERTPVGQGSWAHPGRTRGPSDRGFCVVSPARPAEEATSLEGALSGTRHSHPSVGRQHHAGPPSTSRPPRPWDTPCPPVYAETKHFLYSSGDKEQLRPSFLLSSLRPSLTGARRLVETIFLGSRPWMPGTPRRLPRLPQRYWQMRPLFLELLGNHAQCPYGVLLKTHCPLRAAVTPAAGVCAREKPQGSVAAPEEEDTDPRRLVQLLRQHSSPWQVYGFVRACLRRLVPPGLWGSRHNERRFLRNTKKFISLGKHAKLSLQELTWKMSVRDCAWLRRSPGVGCVPAAEHRLREEILAKFLHWLMSVYVVELLRSFFYVTETTFQKNRLFFYRKSVWSKLQSIGIRQHLKRVQLRELSEAEVRQHREARPALLTSRLRFIPKPDGLRPIVNMDYVVGARTFRREKRAERLTSRVKALFSVLNYERARRPGLLGASVLGLDDIHRAWRTFVLRVRAQDPPPELYFVKVAITGAYDTIPQDRLTEVIASIIKPQNTYCVRRYAVVQKAAHGHVRKAFKSHVSTLTDLQPYMRQFVAHLQETSPLRDAVVIEQSSSLNEASSGLFDVFLRFMCHHAVRIRGKSYVQCQGIPQGSILSTLLCSLCYGDMENKLFAGIRRDGLLLRLVDDFLLVTPHLTHAKTFLRTLVRGVPEYGCVVNLRKTVVNFPVEDEALGGTAFVQMPAHGLFPWCGLLLDTRTLEVQSDYSSYARTSIRASLTFNRGFKAGRNMRRKLFGVLRLKCHSLFLDLQVNSLQTVCTNIYKILLLQAYRFHACVLQLPFHQQVWKNPTFFLRVISDTASLCYSILKAKNAGMSLGAKGAAGPLPSEAVQWLCHQAFLLKLTRHRVTYVPLLGSLRTAQTQLSRKLPGTTLTALEAAANPALPSDFKTILD

SEQ ID NO: 43 - DNA, 6117 bp, Artificial Sequence
  Synthetic Construct
atggctagcacccctggaacccagagccccttcttccttctgctgctgctgaccgtgctgactgtcgtgacaggctctggccacgccagctctacacctggcggcgagaaagagacaagcgccacccagagaagcagcgtgccaagcagcaccgagaagaacgccgtgtccatgaccagctccgtgctgagcagccactctcctggcagcggcagcagcacaacacagggccaggatgtgacactggcccctgccacagaacctgcctctggatctgccgccacctggggacaggacgtgacaagcgtgccagtgaccagacctgccctgggctctacaacaccccctgcccacgatgtgaccagcgcccctgataacaagcctgcccctggaagcacagcccctccagctcatggcgtgacctctgccccagataccagaccagccccaggatctacagccccacccgcacacggcgtgacaagtgcccctgacacaagacccgctccaggctctactgctcctcctgcccatggcgtgacaagcgctcccgatacaaggccagctcctggctccacagcaccaccagcacatggcgtgacatcagctcccgacactagacctgctcccggatcaaccgctccaccagctcacggcgtgaccagcgcacctgataccagacctgctctgggaagcaccgcccctcccgtgcacaatgtgacatctgcttccggcagcgccagcggctctgcctctacactggtgcacaacggcaccagcgccagagccacaacaaccccagccagcaagagcacccccttcagcatccctagccaccacagcgacacccctaccacactggccagccactccaccaagaccgatgcctctagcacccaccactccagcgtgccccctctgaccagcagcaaccacagcacaagcccccagctgtctaccggcgtctcattcttctttctgtccttccacatcagcaacctgcagttcaacagcagcctggaagatcccagcaccgactactaccaggaactgcagcgggatatcagcgagatgttcctgcaaatctacaagcagggcggcttcctgggcctgagcaacatcaagttcagacccggcagcgtggtggtgcagctgaccctggctttccgggaaggcaccatcaacgtgcacgacgtggaaacccagttcaaccagtacaagaccgaggccgccagccggtacaacctgaccatctccgatgtgtccgtgtccgacgtgcccttcccattctctgcccagtctggcgcaggcgtgccaggatggggaattgctctgctggtgctcgtgtgcgtgctggtggccctggccatcgtgtatctgattgccctggccgtgtgccagtgccggcggaagaattacggccagctggacatcttccccgccagagacacctaccaccccatgagcgagtaccccacataccacacccacggcagatacgtgccacccagctccaccgacagatccccctacgagaaagtgtctgccggcaacggcggcagctccctgagctacacaaatcctgccgtggccgctgcctccgccaacctgggatccggcagaatcttcaacgcccactacgccggctacttcgccgacctgctgatccacgacatcgagacaaaccctggccccctggctggcgagacaggacaggaagccgctcctctggacggcgtgctggccaaccctcccaatatcagcagcctgagccccagacagctgctgggattcccttgtgccgaggtgtccggcctgagcacagagagagtgcgggaactggctgtggccctggcccagaaaaacgtgaagctgagcaccgagcagctgcggtgcctggcccacagactgtctgagcctcccgaggatctggacgccctgcctctggatctgctgctgttcctgaaccccgacgccttcagcggacctcaggcctgcacccggttcttcagcagaatcaccaaggccaacgtggacctgctgcccagaggcgcccctgagagacagagactgctgcctgctgctctggcctgttggggagtgcggggctctctgctgtctgaagctgatgtgcgggccctgggaggcctggcttgtgatctgcctggaagattcgtggccgagagcgccgaagtgctgctgcctagactggtgtcctgtcccggccctctggaccaggatcagcaggaagctgccagagctgctctgcagggcggaggccctccttatggacctcctagcacttggagcgtgtccaccatggatgccctgaggggcctgctgccagtgctgggccagcctatcatcagatccatcccacagggcatcgtggccgcctggcggcagagaagctctagagatccctcttggcggcagcccgagcggacaatcctgcggcccaggtttcggagagaggtggaaaagaccgcctgcccctctggcaagaaggccagagagatcgacgagagcctgatcttctacaagaagtgggagctggaagcctgcgtggacgccgctctgctggccacccagatggacagagtgaacgccatccccttcacctatgagcagctggacgtgctgaagcacaagctggatgagctgtacccccagggctaccccgagagcgtgatccagcacctgggctacctgtttctgaagatgagccccgaggacatccggaagtggaacgtgaccagcctggaaaccctgaaggccctgctggaagtgaacaagggccacgagatgtccccccaggtggccacactgatcgacagattcgtgaagggcagaggccagctggacaaggacaccctggatacactgaccgccttctaccccggctatctgtgcagcctgtcccccgaggaactgagcagcgtgccacctagctctatctgggctgtgcggccccaggacctggatacctgcgatcctagacagctggatgtgctgtatcccaaggcccggctggccttccagaacatgaacggcagcgagtacttcgtgaagatccagtccttcctgggcggagcccctaccgaggacctgaaagctctgagccagcagaacgtgtccatggatctggccacctttatgaagctgcggaccgacgccgtgctgcctctgacagtggctgaggtgcagaaactgctgggcccccatgtggaagggctgaaggccgaagaacggcacagacccgtgcgcgactggatcctgaggcagagacaggatgacctggacacactgggcctgggactgcaggggggcatccctaatggctacctggtgctggacctgagcatgcaggaagccctgggatccggcgagggcagaggcagcctgctgacatgtggcgacgtggaagagaaccctggccccggagctgccccggagccggagaggacccccgttggccagggatcgtgggcccatccgggacgcaccaggggaccatccgacaggggattctgtgtggtgtcaccggccaggccagcagaagaggcaaccagcctcgagggagcgttgtctggaaccagacattcccacccgtcggtgggccggcagcaccacgcgggaccaccgtccacttccagaccgccacggccatgggacaccccttgcccgcctgtgtatgccgagactaaacacttcctgtactcatccggagacaaggaacagcttcggccgtccttcctcctgtcgtcgctcagaccgagcctgaccggagcacgcagattggtggaaactatcttccttgggtcacgtccgtggatgccaggtaccccacggcgcctcccgcgcctcccacagagatactggcagatgcggcctctgttcctggaattgctgggaaaccacgctcagtgcccgtacggagtcctgctcaagactcactgccctctgagggcggcggtcactccggcggccggagtgtgcgcacgggagaagccccagggaagcgtggcagctccggaagaggaggacaccgatccgcgccgcctcgtgcaacttctgcgccagcactcctcgccctggcaagtctacgggttcgtccgcgcctgcctgcgccgcctggtgccgcctgggctctggggttcccggcataacgagcgccgcttcctgagaaatactaagaagtttatctcacttggaaaacatgccaagttgtcgctgcaagaactcacgtggaagatgtcagtccgcgattgcgcctggctgcgccgctcgccgggcgtcgggtgtgttccagctgcagaacaccgcctgagagaagaaattctggccaaatttctgcattggctgatgtcagtgtacgtggtcgagctgctgcgctcctttttctacgtcactgagactacctttcaaaagaaccgcctgttcttctaccgcaaatctgtgtggagcaagctgcagtcaatcggcattcgccagcatctgaagagggtgcagctgcgggaactttccgaggcagaagtccgccagcaccgggaggcccggccggcgcttctcacgtcgcgtctgagattcatcccaaagcccgacgggctgaggcctatcgtcaacatggattacgtcgtgggcgctcgcacctttcgccgtgaaaagcgggccgaacgcttgacctcacgggtgaaggccctcttctccgtgctgaactacgagagagcaagacggcctggcctgctgggagcttcggtgctgggactggacgatatccaccgggcttggcggacctttgttctccgggtgagagcccaagaccctccgccggaactgtacttcgtgaaggtggcgatcaccggagcctatgatactattccgcaagatcgactcaccgaagtcatcgcctcgatcatcaaaccgcagaacacttactgcgtcaggcggtacgccgtggtccagaaggccgcgcatggccacgtgagaaaggcgttcaagtcgcacgtgtccactctcaccgacctccagccttacatgaggcaattcgttgcgcatttgcaagagacttcgcccctgagagatgcggtggtcatcgagcagagctccagcctgaacgaagcgagcagcggtctgtttgacgtgttcctccgcttcatgtgtcatcacgcggtgcgaatcaggggaaaatcatacgtgcagtgccagggaatcccacaaggcagcattctgtcgactctcttgtgttccctttgctacggcgatatggaaaacaagctgttcgctgggatcagacgggacgggttgctgctcagactggtggacgacttcctgctggtgactccgcacctcactcacgccaaaacctttctccgcactctggtgaggggagtgccagaatacggctgtgtggtcaatctccggaaaactgtggtgaatttccctgtcgaggatgaggcactcggaggaaccgcatttgtccaaatgccagcacatggcctgttcccatggtgcggtctgctgctggacacccgaactcttgaagtgcagtccgactactccagctatgcccggacgagcatccgcgccagcctcactttcaatcgcggctttaaggccggacgaaacatgcgcagaaagcttttcggagtcctccggcttaaatgccattcgctctttctcgatctccaagtcaattcgctgcagaccgtgtgcacgaacatctacaagatcctgctgctccaagcctaccggttccacgcttgcgtgcttcagctgccgtttcaccaacaggtgtggaagaacccgaccttctttctgcgggtcattagcgatactgcctccctgtgttactcaatcctcaaggcaaagaacgccggaatgtcgctgggtgcgaaaggagccgcgggacctcttcctagcgaagcggtgcagtggctctgccaccaggctttcctcctgaagctgaccaggcacagagtgacctacgtcccgctgctgggctcgctgcgcactgcacagacccagctgtctagaaaactccccggcaccaccctgaccgctctggaagccgccgccaacccagcattgccgtcagatttcaagaccatcttggac

SEQ ID NO: 44 - protein, 2039 aa, Artificial Sequence
  Synthetic Construct
MASTPGTQSPFFLLLLLTVLTVVTGSGHASSTPGGEKETSATQRSSVPSSTEKNAVSMTSSVLSSHSPGSGSSTTQGQDVTLAPATEPASGSAATWGQDVTSVPVTRPALGSTTPPAHDVTSAPDNKPAPGSTAPPAHGVTSAPDTRPAPGSTAPPAHGVTSAPDTRPAPGSTAPPAHGVTSAPDTRPAPGSTAPPAHGVTSAPDTRPAPGSTAPPAHGVTSAPDTRPALGSTAPPVHNVTSASGSASGSASTLVHNGTSARATTTPASKSTPFSIPSHHSDTPTTLASHSTKTDASSTHHSSVPPLTSSNHSTSPQLSTGVSFFFLSFHISNLQFNSSLEDPSTDYYQELQRDISEMFLQIYKQGGFLGLSNIKFRPGSVVVQLTLAFREGTINVHDVETQFNQYKTEAASRYNLTISDVSVSDVPFPFSAQSGAGVPGWGIALLVLVCVLVALAIVYLIALAVCQCRRKNYGQLDIFPARDTYHPMSEYPTYHTHGRYVPPSSTDRSPYEKVSAGNGGSSLSYTNPAVAAASANLGSGRIFNAHYAGYFADLLIHDIETNPGPLAGETGQEAAPLDGVLANPPNISSLSPRQLLGFPCAEVSGLSTERVRELAVALAQKNVKLSTEQLRCLAHRLSEPPEDLDALPLDLLLFLNPDAFSGPQACTRFFSRITKANVDLLPRGAPERQRLLPAALACWGVRGSLLSEADVRALGGLACDLPGRFVAESAEVLLPRLVSCPGPLDQDQQEAARAALQGGGPPYGPPSTWSVSTMDALRGLLPVLGQPIIRSIPQGIVAAWRQRSSRDPSWRQPERTILRPRFRREVEKTACPSGKKAREIDESLIFYKKWELEACVDAALLATQMDRVNAIPFTYEQLDVLKHKLDELYPQGYPESVIQHLGYLFLKMSPEDIRKWNVTSLETLKALLEVNKGHEMSPQVATLIDRFVKGRGQLDKDTLDTLTAFYPGYLCSLSPEELSSVPPSSIWAVRPQDLDTCDPRQLDVLYPKARLAFQNMNGSEYFVKIQSFLGGAPTEDLKALSQQNVSMDLATFMKLRTDAVLPLTVAEVQKLLGPHVEGLKAEERHRPVRDWILRQRQDDLDTLGLGLQGGIPNGYLVLDLSMQEALGSGEGRGSLLTCGDVEENPGPGAAPEPERTPVGQGSWAHPGRTRGPSDRGFCVVSPARPAEEATSLEGALSGTRHSHPSVGRQHHAGPPSTSRPPRPWDTPCPPVYAETKHFLYSSGDKEQLRPSFLLSSLRPSLTGARRLVETIFLGSRPWMPGTPRRLPRLPQRYWQMRPLFLELLGNHAQCPYGVLLKTHCPLRAAVTPAAGVCAREKPQGSVAAPEEEDTDPRRLVQLLRQHSSPWQVYGFVRACLRRLVPPGLWGSRHNERRFLRNTKKFISLGKHAKLSLQELTWKMSVRDCAWLRRSPGVGCVPAAEHRLREEILAKFLHWLMSVYVVELLRSFFYVTETTFQKNRLFFYRKSVWSKLQSIGIRQHLKRVQLRELSEAEVRQHREARPALLTSRLRFIPKPDGLRPIVNMDYVVGARTFRREKRAERLTSRVKALFSVLNYERARRPGLLGASVLGLDDIHRAWRTFVLRVRAQDPPPELYFVKVAITGAYDTIPQDRLTEVIASIIKPQNTYCVRRYAVVQKAAHGHVRKAFKSHVSTLTDLQPYMRQFVAHLQETSPLRDAVVIEQSSSLNEASSGLFDVFLRFMCHHAVRIRGKSYVQCQGIPQGSILSTLLCSLCYGDMENKLFAGIRRDGLLLRLVDDFLLVTPHLTHAKTFLRTLVRGVPEYGCVVNLRKTVVNFPVEDEALGGTAFVQMPAHGLFPWCGLLLDTRTLEVQSDYSSYARTSIRASLTFNRGFKAGRNMRRKLFGVLRLKCHSLFLDLQVNSLQTVCTNIYKILLLQAYRFHACVLQLPFHQQVWKNPTFFLRVISDTASLCYSILKAKNAGMSLGAKGAAGPLPSEAVQWLCHQAFLLKLTRHRVTYVPLLGSLRTAQTQLSRKLPGTTLTALEAAANPALPSDFKTILD

SEQ ID NO: 45 - DNA, 6117 bp, Artificial Sequence
  Synthetic Construct
atggctagcacccctggaacccagagccccttcttccttctgctgctgctgaccgtgctgactgtcgtgacaggctctggccacgccagctctacacctggcggcgagaaagagacaagcgccacccagagaagcagcgtgccaagcagcaccgagaagaacgccgtgtccatgaccagctccgtgctgagcagccactctcctggcagcggcagcagcacaacacagggccaggatgtgacactggcccctgccacagaacctgcctctggatctgccgccacctggggacaggacgtgacaagcgtgccagtgaccagacctgccctgggctctacaacaccccctgcccacgatgtgaccagcgcccctgataacaagcctgcccctggaagcacagcccctccagctcatggcgtgacctctgccccagataccagaccagccccaggatctacagccccacccgcacacggcgtgacaagtgcccctgacacaagacccgctccaggctctactgctcctcctgcccatggcgtgacaagcgctcccgatacaaggccagctcctggctccacagcaccaccagcacatggcgtgacatcagctcccgacactagacctgctcccggatcaaccgctccaccagctcacggcgtgaccagcgcacctgataccagacctgctctgggaagcaccgcccctcccgtgcacaatgtgacatctgcttccggcagcgccagcggctctgcctctacactggtgcacaacggcaccagcgccagagccacaacaaccccagccagcaagagcacccccttcagcatccctagccaccacagcgacacccctaccacactggccagccactccaccaagaccgatgcctctagcacccaccactccagcgtgccccctctgaccagcagcaaccacagcacaagcccccagctgtctaccggcgtctcattcttctttctgtccttccacatcagcaacctgcagttcaacagcagcctggaagatcccagcaccgactactaccaggaactgcagcgggatatcagcgagatgttcctgcaaatctacaagcagggcggcttcctgggcctgagcaacatcaagttcagacccggcagcgtggtggtgcagctgaccctggctttccgggaaggcaccatcaacgtgcacgacgtggaaacccagttcaaccagtacaagaccgaggccgccagccggtacaacctgaccatctccgatgtgtccgtgtccgacgtgcccttcccattctctgcccagtctggcgcaggcgtgccaggatggggaattgctctgctggtgctcgtgtgcgtgctggtggccctggccatcgtgtatctgattgccctggccgtgtgccagtgccggcggaagaattacggccagctggacatcttccccgccagagacacctaccaccccatgagcgagtaccccacataccacacccacggcagatacgtgccacccagctccaccgacagatccccctacgagaaagtgtctgccggcaacggcggcagctccctgagctacacaaatcctgccgtggccgctgcctccgccaacctgggatccggcacaatcctgtctgagggcgccaccaacttcagcctgctgaaactggccggcgacgtggaactgaaccctggccctggagctgccccggagccggagaggacccccgttggccagggatcgtgggcccatccgggacgcaccaggggaccatccgacaggggattctgtgtggtgtcaccggccaggccagcagaagaggcaaccagcctcgagggagcgttgtctggaaccagacattcccacccgtcggtgggccggcagcaccacgcgggaccaccgtccacttccagaccgccacggccatgggacaccccttgcccgcctgtgtatgccgagactaaacacttcctgtactcatccggagacaaggaacagcttcggccgtccttcctcctgtcgtcgctcagaccgagcctgaccggagcacgcagattggtggaaactatcttccttgggtcacgtccgtggatgccaggtaccccacggcgcctcccgcgcctcccacagagatactggcagatgcggcctctgttcctggaattgctgggaaaccacgctcagtgcccgtacggagtcctgctcaagactcactgccctctgagggcggcggtcactccggcggccggagtgtgcgcacgggagaagccccagggaagcgtggcagctccggaagaggaggacaccgatccgcgccgcctcgtgcaacttctgcgccagcactcctcgccctggcaagtctacgggttcgtccgcgcctgcctgcgccgcctggtgccgcctgggctctggggttcccggcataacgagcgccgcttcctgagaaatactaagaagtttatctcacttggaaaacatgccaagttgtcgctgcaagaactcacgtggaagatgtcagtccgcgattgcgcctggctgcgccgctcgccgggcgtcgggtgtgttccagctgcagaacaccgcctgagagaagaaattctggccaaatttctgcattggctgatgtcagtgtacgtggtcgagctgctgcgctcctttttctacgtcactgagactacctttcaaaagaaccgcctgttcttctaccgcaaatctgtgtggagcaagctgcagtcaatcggcattcgccagcatctgaagagggtgcagctgcgggaactttccgaggcagaagtccgccagcaccgggaggcccggccggcgcttctcacgtcgcgtctgagattcatcccaaagcccgacgggctgaggcctatcgtcaacatggattacgtcgtgggcgctcgcacctttcgccgtgaaaagcgggccgaacgcttgacctcacgggtgaaggccctcttctccgtgctgaactacgagagagcaagacggcctggcctgctgggagcttcggtgctgggactggacgatatccaccgggcttggcggacctttgttctccgggtgagagcccaagaccctccgccggaactgtacttcgtgaaggtggcgatcaccggagcctatgatactattccgcaagatcgactcaccgaagtcatcgcctcgatcatcaaaccgcagaacacttactgcgtcaggcggtacgccgtggtccagaaggccgcgcatggccacgtgagaaaggcgttcaagtcgcacgtgtccactctcaccgacctccagccttacatgaggcaattcgttgcgcatttgcaagagacttcgcccctgagagatgcggtggtcatcgagcagagctccagcctgaacgaagcgagcagcggtctgtttgacgtgttcctccgcttcatgtgtcatcacgcggtgcgaatcaggggaaaatcatacgtgcagtgccagggaatcccacaaggcagcattctgtcgactctcttgtgttccctttgctacggcgatatggaaaacaagctgttcgctgggatcagacgggacgggttgctgctcagactggtggacgacttcctgctggtgactccgcacctcactcacgccaaaacctttctccgcactctggtgaggggagtgccagaatacggctgtgtggtcaatctccggaaaactgtggtgaatttccctgtcgaggatgaggcactcggaggaaccgcatttgtccaaatgccagcacatggcctgttcccatggtgcggtctgctgctggacacccgaactcttgaagtgcagtccgactactccagctatgcccggacgagcatccgcgccagcctcactttcaatcgcggctttaaggccggacgaaacatgcgcagaaagcttttcggagtcctccggcttaaatgccattcgctctttctcgatctccaagtcaattcgctgcagaccgtgtgcacgaacatctacaagatcctgctgctccaagcctaccggttccacgcttgcgtgcttcagctgccgtttcaccaacaggtgtggaagaacccgaccttctttctgcgggtcattagcgatactgcctccctgtgttactcaatcctcaaggcaaagaacgccggaatgtcgctgggtgcgaaaggagccgcgggacctcttcctagcgaagcggtgcagtggctctgccaccaggctttcctcctgaagctgaccaggcacagagtgacctacgtcccgctgctgggctcgctgcgcactgcacagacccagctgtctagaaaactccccggcaccaccctgaccgctctggaagccgccgccaacccagcattgccgtcagatttcaagaccatcttggacggatccggcgagggcagaggcagcctgctgacatgtggcgacgtggaagagaaccctggccccctggctggcgagacaggacaggaagccgctcctctggacggcgtgctggccaaccctcccaatatcagcagcctgagccccagacagctgctgggattcccttgtgccgaggtgtccggcctgagcacagagagagtgcgggaactggctgtggccctggcccagaaaaacgtgaagctgagcaccgagcagctgcggtgcctggcccacagactgtctgagcctcccgaggatctggacgccctgcctctggatctgctgctgttcctgaaccccgacgccttcagcggacctcaggcctgcacccggttcttcagcagaatcaccaaggccaacgtggacctgctgcccagaggcgcccctgagagacagagactgctgcctgctgctctggcctgttggggagtgcggggctctctgctgtctgaagctgatgtgcgggccctgggaggcctggcttgtgatctgcctggaagattcgtggccgagagcgccgaagtgctgctgcctagactggtgtcctgtcccggccctctggaccaggatcagcaggaagctgccagagctgctctgcagggcggaggccctccttatggacctcctagcacttggagcgtgtccaccatggatgccctgaggggcctgctgccagtgctgggccagcctatcatcagatccatcccacagggcatcgtggccgcctggcggcagagaagctctagagatccctcttggcggcagcccgagcggacaatcctgcggcccaggtttcggagagaggtggaaaagaccgcctgcccctctggcaagaaggccagagagatcgacgagagcctgatcttctacaagaagtgggagctggaagcctgcgtggacgccgctctgctggccacccagatggacagagtgaacgccatccccttcacctatgagcagctggacgtgctgaagcacaagctggatgagctgtacccccagggctaccccgagagcgtgatccagcacctgggctacctgtttctgaagatgagccccgaggacatccggaagtggaacgtgaccagcctggaaaccctgaaggccctgctggaagtgaacaagggccacgagatgtccccccaggtggccacactgatcgacagattcgtgaagggcagaggccagctggacaaggacaccctggatacactgaccgccttctaccccggctatctgtgcagcctgtcccccgaggaactgagcagcgtgccacctagctctatctgggctgtgcggccccaggacctggatacctgcgatcctagacagctggatgtgctgtatcccaaggcccggctggccttccagaacatgaacggcagcgagtacttcgtgaagatccagtccttcctgggcggagcccctaccgaggacctgaaagctctgagccagcagaacgtgtccatggatctggccacctttatgaagctgcggaccgacgccgtgctgcctctgacagtggctgaggtgcagaaactgctgggcccccatgtggaagggctgaaggccgaagaacggcacagacccgtgcgcgactggatcctgaggcagagacaggatgacctggacacactgggcctgggactgcaggggggcatccctaatggctacctggtgctggacctgagcatgcaggaagccctg

SEQ ID NO: 46 - protein, 2039 aa, Artificial Sequence
  Synthetic Construct
MASTPGTQSPFFLLLLLTVLTVVTGSGHASSTPGGEKETSATQRSSVPSSTEKNAVSMTSSVLSSHSPGSGSSTTQGQDVTLAPATEPASGSAATWGQDVTSVPVTRPALGSTTPPAHDVTSAPDNKPAPGSTAPPAHGVTSAPDTRPAPGSTAPPAHGVTSAPDTRPAPGSTAPPAHGVTSAPDTRPAPGSTAPPAHGVTSAPDTRPAPGSTAPPAHGVTSAPDTRPALGSTAPPVHNVTSASGSASGSASTLVHNGTSARATTTPASKSTPFSIPSHHSDTPTTLASHSTKTDASSTHHSSVPPLTSSNHSTSPQLSTGVSFFFLSFHISNLQFNSSLEDPSTDYYQELQRDISEMFLQIYKQGGFLGLSNIKFRPGSVVVQLTLAFREGTINVHDVETQFNQYKTEAASRYNLTISDVSVSDVPFPFSAQSGAGVPGWGIALLVLVCVLVALAIVYLIALAVCQCRRKNYGQLDIFPARDTYHPMSEYPTYHTHGRYVPPSSTDRSPYEKVSAGNGGSSLSYTNPAVAAASANLGSGTILSEGATNFSLLKLAGDVELNPGPGAAPEPERTPVGQGSWAHPGRTRGPSDRGFCVVSPARPAEEATSLEGALSGTRHSHPSVGRQHHAGPPSTSRPPRPWDTPCPPVYAETKHFLYSSGDKEQLRPSFLLSSLRPSLTGARRLVETIFLGSRPWMPGTPRRLPRLPQRYWQMRPLFLELLGNHAQCPYGVLLKTHCPLRAAVTPAAGVCAREKPQGSVAAPEEEDTDPRRLVQLLRQHSSPWQVYGFVRACLRRLVPPGLWGSRHNERRFLRNTKKFISLGKHAKLSLQELTWKMSVRDCAWLRRSPGVGCVPAAEHRLREEILAKFLHWLMSVYVVELLRSFFYVTETTFQKNRLFFYRKSVWSKLQSIGIRQHLKRVQLRELSEAEVRQHREARPALLTSRLRFIPKPDGLRPIVNMDYVVGARTFRREKRAERLTSRVKALFSVLNYERARRPGLLGASVLGLDDIHRAWRTFVLRVRAQDPPPELYFVKVAITGAYDTIPQDRLTEVIASIIKPQNTYCVRRYAVVQKAAHGHVRKAFKSHVSTLTDLQPYMRQFVAHLQETSPLRDAVVIEQSSSLNEASSGLFDVFLRFMCHHAVRIRGKSYVQCQGIPQGSILSTLLCSLCYGDMENKLFAGIRRDGLLLRLVDDFLLVTPHLTHAKTFLRTLVRGVPEYGCVVNLRKTVVNFPVEDEALGGTAFVQMPAHGLFPWCGLLLDTRTLEVQSDYSSYARTSIRASLTFNRGFKAGRNMRRKLFGVLRLKCHSLFLDLQVNSLQTVCTNIYKILLLQAYRFHACVLQLPFHQQVWKNPTFFLRVISDTASLCYSILKAKNAGMSLGAKGAAGPLPSEAVQWLCHQAFLLKLTRHRVTYVPLLGSLRTAQTQLSRKLPGTTLTALEAAANPALPSDFKTILDGSGEGRGSLLTCGDVEENPGPLAGETGQEAAPLDGVLANPPNISSLSPRQLLGFPCAEVSGLSTERVRELAVALAQKNVKLSTEQLRCLAHRLSEPPEDLDALPLDLLLFLNPDAFSGPQACTRFFSRITKANVDLLPRGAPERQRLLPAALACWGVRGSLLSEADVRALGGLACDLPGRFVAESAEVLLPRLVSCPGPLDQDQQEAARAALQGGGPPYGPPSTWSVSTMDALRGLLPVLGQPIIRSIPQGIVAAWRQRSSRDPSWRQPERTILRPRFRREVEKTACPSGKKAREIDESLIFYKKWELEACVDAALLATQMDRVNAIPFTYEQLDVLKHKLDELYPQGYPESVIQHLGYLFLKMSPEDIRKWNVTSLETLKALLEVNKGHEMSPQVATLIDRFVKGRGQLDKDTLDTLTAFYPGYLCSLSPEELSSVPPSSIWAVRPQDLDTCDPRQLDVLYPKARLAFQNMNGSEYFVKIQSFLGGAPTEDLKALSQQNVSMDLATFMKLRTDAVLPLTVAEVQKLLGPHVEGLKAEERHRPVRDWILRQRQDDLDTLGLGLQGGIPNGYLVLDLSMQEAL

SEQ ID NO: 47 - DNA, 6138 bp, Artificial Sequence
  Synthetic Construct
atggctagcctggctggcgagacaggacaggaagccgctcctctggacggcgtgctggccaaccctcccaatatcagcagcctgagccccagacagctgctgggattcccttgtgccgaggtgtccggcctgagcacagagagagtgcgggaactggctgtggccctggcccagaaaaacgtgaagctgagcaccgagcagctgcggtgcctggcccacagactgtctgagcctcccgaggatctggacgccctgcctctggatctgctgctgttcctgaaccccgacgccttcagcggacctcaggcctgcacccggttcttcagcagaatcaccaaggccaacgtggacctgctgcccagaggcgcccctgagagacagagactgctgcctgctgctctggcctgttggggagtgcggggctctctgctgtctgaagctgatgtgcgggccctgggaggcctggcttgtgatctgcctggaagattcgtggccgagagcgccgaagtgctgctgcctagactggtgtcctgtcccggccctctggaccaggatcagcaggaagctgccagagctgctctgcagggcggaggccctccttatggacctcctagcacttggagcgtgtccaccatggatgccctgaggggcctgctgccagtgctgggccagcctatcatcagatccatcccacagggcatcgtggccgcctggcggcagagaagctctagagatccctcttggcggcagcccgagcggacaatcctgcggcccaggtttcggagagaggtggaaaagaccgcctgcccctctggcaagaaggccagagagatcgacgagagcctgatcttctacaagaagtgggagctggaagcctgcgtggacgccgctctgctggccacccagatggacagagtgaacgccatccccttcacctatgagcagctggacgtgctgaagcacaagctggatgagctgtacccccagggctaccccgagagcgtgatccagcacctgggctacctgtttctgaagatgagccccgaggacatccggaagtggaacgtgaccagcctggaaaccctgaaggccctgctggaagtgaacaagggccacgagatgtccccccaggtggccacactgatcgacagattcgtgaagggcagaggccagctggacaaggacaccctggatacactgaccgccttctaccccggctatctgtgcagcctgtcccccgaggaactgagcagcgtgccacctagctctatctgggctgtgcggccccaggacctggatacctgcgatcctagacagctggatgtgctgtatcccaaggcccggctggccttccagaacatgaacggcagcgagtacttcgtgaagatccagtccttcctgggcggagcccctaccgaggacctgaaagctctgagccagcagaacgtgtccatggatctggccacctttatgaagctgcggaccgacgccgtgctgcctctgacagtggctgaggtgcagaaactgctgggcccccatgtggaagggctgaaggccgaagaacggcacagacccgtgcgcgactggatcctgaggcagagacaggatgacctggacacactgggcctgggactgcaggggggcatccctaatggctacctggtgctggacctgagcatgcaggaagccctgggatccggcagaatcttcaacgcccactacgccggctacttcgccgacctgctgatccacgacatcgagacaaaccctggccccacccctggaacccagagccccttcttccttctgctgctgctgaccgtgctgactgtcgtgacaggctctggccacgccagctctacacctggcggcgagaaagagacaagcgccacccagagaagcagcgtgccaagcagcaccgagaagaacgccgtgtccatgaccagctccgtgctgagcagccactctcctggcagcggcagcagcacaacacagggccaggatgtgacactggcccctgccacagaacctgcctctggatctgccgccacctggggacaggacgtgacaagcgtgccagtgaccagacctgccctgggctctacaacaccccctgcccacgatgtgaccagcgcccctgataacaagcctgcccctggaagcacagcccctccagctcatggcgtgacctctgccccagataccagaccagccccaggatctacagccccacccgcacacggcgtgacaagtgcccctgacacaagacccgctccaggctctactgctcctcctgcccatggcgtgacaagcgctcccgatacaaggccagctcctggctccacagcaccaccagcacatggcgtgacatcagctcccgacactagacctgctcccggatcaaccgctccaccagctcacggcgtgaccagcgcacctgataccagacctgctctgggaagcaccgcccctcccgtgcacaatgtgacatctgcttccggcagcgccagcggctctgcctctacactggtgcacaacggcaccagcgccagagccacaacaaccccagccagcaagagcacccccttcagcatccctagccaccacagcgacacccctaccacactggccagccactccaccaagaccgatgcctctagcacccaccactccagcgtgccccctctgaccagcagcaaccacagcacaagcccccagctgtctaccggcgtctcattcttctttctgtccttccacatcagcaacctgcagttcaacagcagcctggaagatcccagcaccgactactaccaggaactgcagcgggatatcagcgagatgttcctgcaaatctacaagcagggcggcttcctgggcctgagcaacatcaagttcagacccggcagcgtggtggtgcagctgaccctggctttccgggaaggcaccatcaacgtgcacgacgtggaaacccagttcaaccagtacaagaccgaggccgccagccggtacaacctgaccatctccgatgtgtccgtgtccgacgtgcccttcccattctctgcccagtctggcgcaggcgtgccaggatggggaattgctctgctggtgctcgtgtgcgtgctggtggccctggccatcgtgtatctgattgccctggccgtgtgccagtgccggcggaagaattacggccagctggacatcttccccgccagagacacctaccaccccatgagcgagtaccccacataccacacccacggcagatacgtgccacccagctccaccgacagatccccctacgagaaagtgtctgccggcaacggcggcagctccctgagctacacaaatcctgccgtggccgctgcctccgccaacctgggatccggcacaatcctgtctgagggcgccaccaacttcagcctgctgaaactggccggcgacgtggaactgaaccctggccctggagctgccccggagccggagaggacccccgttggccagggatcgtgggcccatccgggacgcaccaggggaccatccgacaggggattctgtgtggtgtcaccggccaggccagcagaagaggcaaccagcctcgagggagcgttgtctggaaccagacattcccacccgtcggtgggccggcagcaccacgcgggaccaccgtccacttccagaccgccacggccatgggacaccccttgcccgcctgtgtatgccgagactaaacacttcctgtactcatccggagacaaggaacagcttcggccgtccttcctcctgtcgtcgctcagaccgagcctgaccggagcacgcagattggtggaaactatcttccttgggtcacgtccgtggatgccaggtaccccacggcgcctcccgcgcctcccacagagatactggcagatgcggcctctgttcctggaattgctgggaaaccacgctcagtgcccgtacggagtcctgctcaagactcactgccctctgagggcggcggtcactccggcggccggagtgtgcgcacgggagaagccccagggaagcgtggcagctccggaagaggaggacaccgatccgcgccgcctcgtgcaacttctgcgccagcactcctcgccctggcaagtctacgggttcgtccgcgcctgcctgcgccgcctggtgccgcctgggctctggggttcccggcataacgagcgccgcttcctgagaaatactaagaagtttatctcacttggaaaacatgccaagttgtcgctgcaagaactcacgtggaagatgtcagtccgcgattgcgcctggctgcgccgctcgccgggcgtcgggtgtgttccagctgcagaacaccgcctgagagaagaaattctggccaaatttctgcattggctgatgtcagtgtacgtggtcgagctgctgcgctcctttttctacgtcactgagactacctttcaaaagaaccgcctgttcttctaccgcaaatctgtgtggagcaagctgcagtcaatcggcattcgccagcatctgaagagggtgcagctgcgggaactttccgaggcagaagtccgccagcaccgggaggcccggccggcgcttctcacgtcgcgtctgagattcatcccaaagcccgacgggctgaggcctatcgtcaacatggattacgtcgtgggcgctcgcacctttcgccgtgaaaagcgggccgaacgcttgacctcacgggtgaaggccctcttctccgtgctgaactacgagagagcaagacggcctggcctgctgggagcttcggtgctgggactggacgatatccaccgggcttggcggacctttgttctccgggtgagagcccaagaccctccgccggaactgtacttcgtgaaggtggcgatcaccggagcctatgatactattccgcaagatcgactcaccgaagtcatcgcctcgatcatcaaaccgcagaacacttactgcgtcaggcggtacgccgtggtccagaaggccgcgcatggccacgtgagaaaggcgttcaagtcgcacgtgtccactctcaccgacctccagccttacatgaggcaattcgttgcgcatttgcaagagacttcgcccctgagagatgcggtggtcatcgagcagagctccagcctgaacgaagcgagcagcggtctgtttgacgtgttcctccgcttcatgtgtcatcacgcggtgcgaatcaggggaaaatcatacgtgcagtgccagggaatcccacaaggcagcattctgtcgactctcttgtgttccctttgctacggcgatatggaaaacaagctgttcgctgggatcagacgggacgggttgctgctcagactggtggacgacttcctgctggtgactccgcacctcactcacgccaaaacctttctccgcactctggtgaggggagtgccagaatacggctgtgtggtcaatctccggaaaactgtggtgaatttccctgtcgaggatgaggcactcggaggaaccgcatttgtccaaatgccagcacatggcctgttcccatggtgcggtctgctgctggacacccgaactcttgaagtgcagtccgactactccagctatgcccggacgagcatccgcgccagcctcactttcaatcgcggctttaaggccggacgaaacatgcgcagaaagcttttcggagtcctccggcttaaatgccattcgctctttctcgatctccaagtcaattcgctgcagaccgtgtgcacgaacatctacaagatcctgctgctccaagcctaccggttccacgcttgcgtgcttcagctgccgtttcaccaacaggtgtggaagaacccgaccttctttctgcgggtcattagcgatactgcctccctgtgttactcaatcctcaaggcaaagaacgccggaatgtcgctgggtgcgaaaggagccgcgggacctcttcctagcgaagcggtgcagtggctctgccaccaggctttcctcctgaagctgaccaggcacagagtgacctacgtcccgctgctgggctcgctgcgcactgcacagacccagctgtctagaaaactccccggcaccaccctgaccgctctggaagccgccgccaacccagcattgccgtcagatttcaagaccatcttggac

SEQ ID NO: 48 - protein, 2046 aa, Artificial Sequence
  Synthetic Construct
MASLAGETGQEAAPLDGVLANPPNISSLSPRQLLGFPCAEVSGLSTERVRELAVALAQKNVKLSTEQLRCLAHRLSEPPEDLDALPLDLLLFLNPDAFSGPQACTRFFSRITKANVDLLPRGAPERQRLLPAALACWGVRGSLLSEADVRALGGLACDLPGRFVAESAEVLLPRLVSCPGPLDQDQQEAARAALQGGGPPYGPPSTWSVSTMDALRGLLPVLGQPIIRSIPQGIVAAWRQRSSRDPSWRQPERTILRPRFRREVEKTACPSGKKAREIDESLIFYKKWELEACVDAALLATQMDRVNAIPFTYEQLDVLKHKLDELYPQGYPESVIQHLGYLFLKMSPEDIRKWNVTSLETLKALLEVNKGHEMSPQVATLIDRFVKGRGQLDKDTLDTLTAFYPGYLCSLSPEELSSVPPSSIWAVRPQDLDTCDPRQLDVLYPKARLAFQNMNGSEYFVKIQSFLGGAPTEDLKALSQQNVSMDLATFMKLRTDAVLPLTVAEVQKLLGPHVEGLKAEERHRPVRDWILRQRQDDLDTLGLGLQGGIPNGYLVLDLSMQEALGSGRIFNAHYAGYFADLLIHDIETNPGPTPGTQSPFFLLLLLTVLTVVTGSGHASSTPGGEKETSATQRSSVPSSTEKNAVSMTSSVLSSHSPGSGSSTTQGQDVTLAPATEPASGSAATWGQDVTSVPVTRPALGSTTPPAHDVTSAPDNKPAPGSTAPPAHGVTSAPDTRPAPGSTAPPAHGVTSAPDTRPAPGSTAPPAHGVTSAPDTRPAPGSTAPPAHGVTSAPDTRPAPGSTAPPAHGVTSAPDTRPALGSTAPPVHNVTSASGSASGSASTLVHNGTSARATTTPASKSTPFSIPSHHSDTPTTLASHSTKTDASSTHHSSVPPLTSSNHSTSPQLSTGVSFFFLSFHISNLQFNSSLEDPSTDYYQELQRDISEMFLQIYKQGGFLGLSNIKFRPGSVVVQLTLAFREGTINVHDVETQFNQYKTEAASRYNLTISDVSVSDVPFPFSAQSGAGVPGWGIALLVLVCVLVALAIVYLIALAVCQCRRKNYGQLDIFPARDTYHPMSEYPTYHTHGRYVPPSSTDRSPYEKVSAGNGGSSLSYTNPAVAAASANLGSGTILSEGATNFSLLKLAGDVELNPGPGAAPEPERTPVGQGSWAHPGRTRGPSDRGFCVVSPARPAEEATSLEGALSGTRHSHPSVGRQHHAGPPSTSRPPRPWDTPCPPVYAETKHFLYSSGDKEQLRPSFLLSSLRPSLTGARRLVETIFLGSRPWMPGTPRRLPRLPQRYWQMRPLFLELLGNHAQCPYGVLLKTHCPLRAAVTPAAGVCAREKPQGSVAAPEEEDTDPRRLVQLLRQHSSPWQVYGFVRACLRRLVPPGLWGSRHNERRFLRNTKKFISLGKHAKLSLQELTWKMSVRDCAWLRRSPGVGCVPAAEHRLREEILAKFLHWLMSVYVVELLRSFFYVTETTFQKNRLFFYRKSVWSKLQSIGIRQHLKRVQLRELSEAEVRQHREARPALLTSRLRFIPKPDGLRPIVNMDYVVGARTFRREKRAERLTSRVKALFSVLNYERARRPGLLGASVLGLDDIHRAWRTFVLRVRAQDPPPELYFVKVAITGAYDTIPQDRLTEVIASIIKPQNTYCVRRYAVVQKAAHGHVRKAFKSHVSTLTDLQPYMRQFVAHLQETSPLRDAVVIEQSSSLNEASSGLFDVFLRFMCHHAVRIRGKSYVQCQGIPQGSILSTLLCSLCYGDMENKLFAGIRRDGLLLRLVDDFLLVTPHLTHAKTFLRTLVRGVPEYGCVVNLRKTVVNFPVEDEALGGTAFVQMPAHGLFPWCGLLLDTRTLEVQSDYSSYARTSIRASLTFNRGFKAGRNMRRKLFGVLRLKCHSLFLDLQVNSLQTVCTNIYKILLLQAYRFHACVLQLPFHQQVWKNPTFFLRVISDTASLCYSILKAKNAGMSLGAKGAAGPLPSEAVQWLCHQAFLLKLTRHRVTYVPLLGSLRTAQTQLSRKLPGTTLTALEAAANPALPSDFKTILD

SEQ ID NO: 49 - DNA, 6117 bp, Artificial Sequence
  Synthetic Construct
atggctagcctggctggcgagacaggacaggaagccgctcctctggacggcgtgctggccaaccctcccaatatcagcagcctgagccccagacagctgctgggattcccttgtgccgaggtgtccggcctgagcacagagagagtgcgggaactggctgtggccctggcccagaaaaacgtgaagctgagcaccgagcagctgcggtgcctggcccacagactgtctgagcctcccgaggatctggacgccctgcctctggatctgctgctgttcctgaaccccgacgccttcagcggacctcaggcctgcacccggttcttcagcagaatcaccaaggccaacgtggacctgctgcccagaggcgcccctgagagacagagactgctgcctgctgctctggcctgttggggagtgcggggctctctgctgtctgaagctgatgtgcgggccctgggaggcctggcttgtgatctgcctggaagattcgtggccgagagcgccgaagtgctgctgcctagactggtgtcctgtcccggccctctggaccaggatcagcaggaagctgccagagctgctctgcagggcggaggccctccttatggacctcctagcacttggagcgtgtccaccatggatgccctgaggggcctgctgccagtgctgggccagcctatcatcagatccatcccacagggcatcgtggccgcctggcggcagagaagctctagagatccctcttggcggcagcccgagcggacaatcctgcggcccaggtttcggagagaggtggaaaagaccgcctgcccctctggcaagaaggccagagagatcgacgagagcctgatcttctacaagaagtgggagctggaagcctgcgtggacgccgctctgctggccacccagatggacagagtgaacgccatccccttcacctatgagcagctggacgtgctgaagcacaagctggatgagctgtacccccagggctaccccgagagcgtgatccagcacctgggctacctgtttctgaagatgagccccgaggacatccggaagtggaacgtgaccagcctggaaaccctgaaggccctgctggaagtgaacaagggccacgagatgtccccccaggtggccacactgatcgacagattcgtgaagggcagaggccagctggacaaggacaccctggatacactgaccgccttctaccccggctatctgtgcagcctgtcccccgaggaactgagcagcgtgccacctagctctatctgggctgtgcggccccaggacctggatacctgcgatcctagacagctggatgtgctgtatcccaaggcccggctggccttccagaacatgaacggcagcgagtacttcgtgaagatccagtccttcctgggcggagcccctaccgaggacctgaaagctctgagccagcagaacgtgtccatggatctggccacctttatgaagctgcggaccgacgccgtgctgcctctgacagtggctgaggtgcagaaactgctgggcccccatgtggaagggctgaaggccgaagaacggcacagacccgtgcgcgactggatcctgaggcagagacaggatgacctggacacactgggcctgggactgcaggggggcatccctaatggctacctggtgctggacctgagcatgcaggaagccctgggatccggcgagggcagaggcagcctgctgacatgtggcgacgtggaagagaaccctggccccggagctgccccggagccggagaggacccccgttggccagggatcgtgggcccatccgggacgcaccaggggaccatccgacaggggattctgtgtggtgtcaccggccaggccagcagaagaggcaaccagcctcgagggagcgttgtctggaaccagacattcccacccgtcggtgggccggcagcaccacgcgggaccaccgtccacttccagaccgccacggccatgggacaccccttgcccgcctgtgtatgccgagactaaacacttcctgtactcatccggagacaaggaacagcttcggccgtccttcctcctgtcgtcgctcagaccgagcctgaccggagcacgcagattggtggaaactatcttccttgggtcacgtccgtggatgccaggtaccccacggcgcctcccgcgcctcccacagagatactggcagatgcggcctctgttcctggaattgctgggaaaccacgctcagtgcccgtacggagtcctgctcaagactcactgccctctgagggcggcggtcactccggcggccggagtgtgcgcacgggagaagccccagggaagcgtggcagctccggaagaggaggacaccgatccgcgccgcctcgtgcaacttctgcgccagcactcctcgccctggcaagtctacgggttcgtccgcgcctgcctgcgccgcctggtgccgcctgggctctggggttcccggcataacgagcgccgcttcctgagaaatactaagaagtttatctcacttggaaaacatgccaagttgtcgctgcaagaactcacgtggaagatgtcagtccgcgattgcgcctggctgcgccgctcgccgggcgtcgggtgtgttccagctgcagaacaccgcctgagagaagaaattctggccaaatttctgcattggctgatgtcagtgtacgtggtcgagctgctgcgctcctttttctacgtcactgagactacctttcaaaagaaccgcctgttcttctaccgcaaatctgtgtggagcaagctgcagtcaatcggcattcgccagcatctgaagagggtgcagctgcgggaactttccgaggcagaagtccgccagcaccgggaggcccggccggcgcttctcacgtcgcgtctgagattcatcccaaagcccgacgggctgaggcctatcgtcaacatggattacgtcgtgggcgctcgcacctttcgccgtgaaaagcgggccgaacgcttgacctcacgggtgaaggccctcttctccgtgctgaactacgagagagcaagacggcctggcctgctgggagcttcggtgctgggactggacgatatccaccgggcttggcggacctttgttctccgggtgagagcccaagaccctccgccggaactgtacttcgtgaaggtggcgatcaccggagcctatgatactattccgcaagatcgactcaccgaagtcatcgcctcgatcatcaaaccgcagaacacttactgcgtcaggcggtacgccgtggtccagaaggccgcgcatggccacgtgagaaaggcgttcaagtcgcacgtgtccactctcaccgacctccagccttacatgaggcaattcgttgcgcatttgcaagagacttcgcccctgagagatgcggtggtcatcgagcagagctccagcctgaacgaagcgagcagcggtctgtttgacgtgttcctccgcttcatgtgtcatcacgcggtgcgaatcaggggaaaatcatacgtgcagtgccagggaatcccacaaggcagcattctgtcgactctcttgtgttccctttgctacggcgatatggaaaacaagctgttcgctgggatcagacgggacgggttgctgctcagactggtggacgacttcctgctggtgactccgcacctcactcacgccaaaacctttctccgcactctggtgaggggagtgccagaatacggctgtgtggtcaatctccggaaaactgtggtgaatttccctgtcgaggatgaggcactcggaggaaccgcatttgtccaaatgccagcacatggcctgttcccatggtgcggtctgctgctggacacccgaactcttgaagtgcagtccgactactccagctatgcccggacgagcatccgcgccagcctcactttcaatcgcggctttaaggccggacgaaacatgcgcagaaagcttttcggagtcctccggcttaaatgccattcgctctttctcgatctccaagtcaattcgctgcagaccgtgtgcacgaacatctacaagatcctgctgctccaagcctaccggttccacgcttgcgtgcttcagctgccgtttcaccaacaggtgtggaagaacccgaccttctttctgcgggtcattagcgatactgcctccctgtgttactcaatcctcaaggcaaagaacgccggaatgtcgctgggtgcgaaaggagccgcgggacctcttcctagcgaagcggtgcagtggctctgccaccaggctttcctcctgaagctgaccaggcacagagtgacctacgtcccgctgctgggctcgctgcgcactgcacagacccagctgtctagaaaactccccggcaccaccctgaccgctctggaagccgccgccaacccagcattgccgtcagatttcaagaccatcttggacggatccggcacaatcctgtctgagggcgccaccaacttcagcctgctgaaactggccggcgacgtggaactgaaccctggccctacccctggaacccagagccccttcttccttctgctgctgctgaccgtgctgactgtcgtgacaggctctggccacgccagctctacacctggcggcgagaaagagacaagcgccacccagagaagcagcgtgccaagcagcaccgagaagaacgccgtgtccatgaccagctccgtgctgagcagccactctcctggcagcggcagcagcacaacacagggccaggatgtgacactggcccctgccacagaacctgcctctggatctgccgccacctggggacaggacgtgacaagcgtgccagtgaccagacctgccctgggctctacaacaccccctgcccacgatgtgaccagcgcccctgataacaagcctgcccctggaagcacagcccctccagctcatggcgtgacctctgccccagataccagaccagccccaggatctacagccccacccgcacacggcgtgacaagtgcccctgacacaagacccgctccaggctctactgctcctcctgcccatggcgtgacaagcgctcccgatacaaggccagctcctggctccacagcaccaccagcacatggcgtgacatcagctcccgacactagacctgctcccggatcaaccgctccaccagctcacggcgtgaccagcgcacctgataccagacctgctctgggaagcaccgcccctcccgtgcacaatgtgacatctgcttccggcagcgccagcggctctgcctctacactggtgcacaacggcaccagcgccagagccacaacaaccccagccagcaagagcacccccttcagcatccctagccaccacagcgacacccctaccacactggccagccactccaccaagaccgatgcctctagcacccaccactccagcgtgccccctctgaccagcagcaaccacagcacaagcccccagctgtctaccggcgtctcattcttctttctgtccttccacatcagcaacctgcagttcaacagcagcctggaagatcccagcaccgactactaccaggaactgcagcgggatatcagcgagatgttcctgcaaatctacaagcagggcggcttcctgggcctgagcaacatcaagttcagacccggcagcgtggtggtgcagctgaccctggctttccgggaaggcaccatcaacgtgcacgacgtggaaacccagttcaaccagtacaagaccgaggccgccagccggtacaacctgaccatctccgatgtgtccgtgtccgacgtgcccttcccattctctgcccagtctggcgcaggcgtgccaggatggggaattgctctgctggtgctcgtgtgcgtgctggtggccctggccatcgtgtatctgattgccctggccgtgtgccagtgccggcggaagaattacggccagctggacatcttccccgccagagacacctaccaccccatgagcgagtaccccacataccacacccacggcagatacgtgccacccagctccaccgacagatccccctacgagaaagtgtctgccggcaacggcggcagctccctgagctacacaaatcctgccgtggccgctgcctccgccaacctg

SEQ ID NO: 50 - protein, 2039 aa, Artificial Sequence
  Synthetic Construct
MASLAGETGQEAAPLDGVLANPPNISSLSPRQLLGFPCAEVSGLSTERVRELAVALAQKNVKLSTEQLRCLAHRLSEPPEDLDALPLDLLLFLNPDAFSGPQACTRFFSRITKANVDLLPRGAPERQRLLPAALACWGVRGSLLSEADVRALGGLACDLPGRFVAESAEVLLPRLVSCPGPLDQDQQEAARAALQGGGPPYGPPSTWSVSTMDALRGLLPVLGQPIIRSIPQGIVAAWRQRSSRDPSWRQPERTILRPRFRREVEKTACPSGKKAREIDESLIFYKKWELEACVDAALLATQMDRVNAIPFTYEQLDVLKHKLDELYPQGYPESVIQHLGYLFLKMSPEDIRKWNVTSLETLKALLEVNKGHEMSPQVATLIDRFVKGRGQLDKDTLDTLTAFYPGYLCSLSPEELSSVPPSSIWAVRPQDLDTCDPRQLDVLYPKARLAFQNMNGSEYFVKIQSFLGGAPTEDLKALSQQNVSMDLATFMKLRTDAVLPLTVAEVQKLLGPHVEGLKAEERHRPVRDWILRQRQDDLDTLGLGLQGGIPNGYLVLDLSMQEALGSGEGRGSLLTCGDVEENPGPGAAPEPERTPVGQGSWAHPGRTRGPSDRGFCVVSPARPAEEATSLEGALSGTRHSHPSVGRQHHAGPPSTSRPPRPWDTPCPPVYAETKHFLYSSGDKEQLRPSFLLSSLRPSLTGARRLVETIFLGSRPWMPGTPRRLPRLPQRYWQMRPLFLELLGNHAQCPYGVLLKTHCPLRAAVTPAAGVCAREKPQGSVAAPEEEDTDPRRLVQLLRQHSSPWQVYGFVRACLRRLVPPGLWGSRHNERRFLRNTKKFISLGKHAKLSLQELTWKMSVRDCAWLRRSPGVGCVPAAEHRLREEILAKFLHWLMSVYVVELLRSFFYVTETTFQKNRLFFYRKSVWSKLQSIGIRQHLKRVQLRELSEAEVRQHREARPALLTSRLRFIPKPDGLRPIVNMDYVVGARTFRREKRAERLTSRVKALFSVLNYERARRPGLLGASVLGLDDIHRAWRTFVLRVRAQDPPPELYFVKVAITGAYDTIPQDRLTEVIASIIKPQNTYCVRRYAVVQKAAHGHVRKAFKSHVSTLTDLQPYMRQFVAHLQETSPLRDAVVIEQSSSLNEASSGLFDVFLRFMCHHAVRIRGKSYVQCQGIPQGSILSTLLCSLCYGDMENKLFAGIRRDGLLLRLVDDFLLVTPHLTHAKTFLRTLVRGVPEYGCVVNLRKTVVNFPVEDEALGGTAFVQMPAHGLFPWCGLLLDTRTLEVQSDYSSYARTSIRASLTFNRGFKAGRNMRRKLFGVLRLKCHSLFLDLQVNSLQTVCTNIYKILLLQAYRFHACVLQLPFHQQVWKNPTFFLRVISDTASLCYSILKAKNAGMSLGAKGAAGPLPSEAVQWLCHQAFLLKLTRHRVTYVPLLGSLRTAQTQLSRKLPGTTLTALEAAANPALPSDFKTILDGSGTILSEGATNFSLLKLAGDVELNPGPTPGTQSPFFLLLLLTVLTVVTGSGHASSTPGGEKETSATQRSSVPSSTEKNAVSMTSSVLSSHSPGSGSSTTQGQDVTLAPATEPASGSAATWGQDVTSVPVTRPALGSTTPPAHDVTSAPDNKPAPGSTAPPAHGVTSAPDTRPAPGSTAPPAHGVTSAPDTRPAPGSTAPPAHGVTSAPDTRPAPGSTAPPAHGVTSAPDTRPAPGSTAPPAHGVTSAPDTRPALGSTAPPVHNVTSASGSASGSASTLVHNGTSARATTTPASKSTPFSIPSHHSDTPTTLASHSTKTDASSTHHSSVPPLTSSNHSTSPQLSTGVSFFFLSFHISNLQFNSSLEDPSTDYYQELQRDISEMFLQIYKQGGFLGLSNIKFRPGSVVVQLTLAFREGTINVHDVETQFNQYKTEAASRYNLTISDVSVSDVPFPFSAQSGAGVPGWGIALLVLVCVLVALAIVYLIALAVCQCRRKNYGQLDIFPARDTYHPMSEYPTYHTHGRYVPPSSTDRSPYEKVSAGNGGSSLSYTNPAVAAASANL

SEQ ID NO: 51 - DNA, 6117 bp, Artificial Sequence
  Synthetic Construct
atggctagcggagctgccccggagccggagaggacccccgttggccagggatcgtgggcccatccgggacgcaccaggggaccatccgacaggggattctgtgtggtgtcaccggccaggccagcagaagaggcaaccagcctcgagggagcgttgtctggaaccagacattcccacccgtcggtgggccggcagcaccacgcgggaccaccgtccacttccagaccgccacggccatgggacaccccttgcccgcctgtgtatgccgagactaaacacttcctgtactcatccggagacaaggaacagcttcggccgtccttcctcctgtcgtcgctcagaccgagcctgaccggagcacgcagattggtggaaactatcttccttgggtcacgtccgtggatgccaggtaccccacggcgcctcccgcgcctcccacagagatactggcagatgcggcctctgttcctggaattgctgggaaaccacgctcagtgcccgtacggagtcctgctcaagactcactgccctctgagggcggcggtcactccggcggccggagtgtgcgcacgggagaagccccagggaagcgtggcagctccggaagaggaggacaccgatccgcgccgcctcgtgcaacttctgcgccagcactcctcgccctggcaagtctacgggttcgtccgcgcctgcctgcgccgcctggtgccgcctgggctctggggttcccggcataacgagcgccgcttcctgagaaatactaagaagtttatctcacttggaaaacatgccaagttgtcgctgcaagaactcacgtggaagatgtcagtccgcgattgcgcctggctgcgccgctcgccgggcgtcgggtgtgttccagctgcagaacaccgcctgagagaagaaattctggccaaatttctgcattggctgatgtcagtgtacgtggtcgagctgctgcgctcctttttctacgtcactgagactacctttcaaaagaaccgcctgttcttctaccgcaaatctgtgtggagcaagctgcagtcaatcggcattcgccagcatctgaagagggtgcagctgcgggaactttccgaggcagaagtccgccagcaccgggaggcccggccggcgcttctcacgtcgcgtctgagattcatcccaaagcccgacgggctgaggcctatcgtcaacatggattacgtcgtgggcgctcgcacctttcgccgtgaaaagcgggccgaacgcttgacctcacgggtgaaggccctcttctccgtgctgaactacgagagagcaagacggcctggcctgctgggagcttcggtgctgggactggacgatatccaccgggcttggcggacctttgttctccgggtgagagcccaagaccctccgccggaactgtacttcgtgaaggtggcgatcaccggagcctatgatactattccgcaagatcgactcaccgaagtcatcgcctcgatcatcaaaccgcagaacacttactgcgtcaggcggtacgccgtggtccagaaggccgcgcatggccacgtgagaaaggcgttcaagtcgcacgtgtccactctcaccgacctccagccttacatgaggcaattcgttgcgcatttgcaagagacttcgcccctgagagatgcggtggtcatcgagcagagctccagcctgaacgaagcgagcagcggtctgtttgacgtgttcctccgcttcatgtgtcatcacgcggtgcgaatcaggggaaaatcatacgtgcagtgccagggaatcccacaaggcagcattctgtcgactctcttgtgttccctttgctacggcgatatggaaaacaagctgttcgctgggatcagacgggacgggttgctgctcagactggtggacgacttcctgctggtgactccgcacctcactcacgccaaaacctttctccgcactctggtgaggggagtgccagaatacggctgtgtggtcaatctccggaaaactgtggtgaatttccctgtcgaggatgaggcactcggaggaaccgcatttgtccaaatgccagcacatggcctgttcccatggtgcggtctgctgctggacacccgaactcttgaagtgcagtccgactactccagctatgcccggacgagcatccgcgccagcctcactttcaatcgcggctttaaggccggacgaaacatgcgcagaaagcttttcggagtcctccggcttaaatgccattcgctctttctcgatctccaagtcaattcgctgcagaccgtgtgcacgaacatctacaagatcctgctgctccaagcctaccggttccacgcttgcgtgcttcagctgccgtttcaccaacaggtgtggaagaacccgaccttctttctgcgggtcattagcgatactgcctccctgtgttactcaatcctcaaggcaaagaacgccggaatgtcgctgggtgcgaaaggagccgcgggacctcttcctagcgaagcggtgcagtggctctgccaccaggctttcctcctgaagctgaccaggcacagagtgacctacgtcccgctgctgggctcgctgcgcactgcacagacccagctgtctagaaaactccccggcaccaccctgaccgctctggaagccgccgccaacccagcattgccgtcagatttcaagaccatcttggacggatccggcgagggcagaggcagcctgctgacatgtggcgacgtggaagagaaccctggccccctggctggcgagacaggacaggaagccgctcctctggacggcgtgctggccaaccctcccaatatcagcagcctgagccccagacagctgctgggattcccttgtgccgaggtgtccggcctgagcacagagagagtgcgggaactggctgtggccctggcccagaaaaacgtgaagctgagcaccgagcagctgcggtgcctggcccacagactgtctgagcctcccgaggatctggacgccctgcctctggatctgctgctgttcctgaaccccgacgccttcagcggacctcaggcctgcacccggttcttcagcagaatcaccaaggccaacgtggacctgctgcccagaggcgcccctgagagacagagactgctgcctgctgctctggcctgttggggagtgcggggctctctgctgtctgaagctgatgtgcgggccctgggaggcctggcttgtgatctgcctggaagattcgtggccgagagcgccgaagtgctgctgcctagactggtgtcctgtcccggccctctggaccaggatcagcaggaagctgccagagctgctctgcagggcggaggccctccttatggacctcctagcacttggagcgtgtccaccatggatgccctgaggggcctgctgccagtgctgggccagcctatcatcagatccatcccacagggcatcgtggccgcctggcggcagagaagctctagagatccctcttggcggcagcccgagcggacaatcctgcggcccaggtttcggagagaggtggaaaagaccgcctgcccctctggcaagaaggccagagagatcgacgagagcctgatcttctacaagaagtgggagctggaagcctgcgtggacgccgctctgctggccacccagatggacagagtgaacgccatccccttcacctatgagcagctggacgtgctgaagcacaagctggatgagctgtacccccagggctaccccgagagcgtgatccagcacctgggctacctgtttctgaagatgagccccgaggacatccggaagtggaacgtgaccagcctggaaaccctgaaggccctgctggaagtgaacaagggccacgagatgtccccccaggtggccacactgatcgacagattcgtgaagggcagaggccagctggacaaggacaccctggatacactgaccgccttctaccccggctatctgtgcagcctgtcccccgaggaactgagcagcgtgccacctagctctatctgggctgtgcggccccaggacctggatacctgcgatcctagacagctggatgtgctgtatcccaaggcccggctggccttccagaacatgaacggcagcgagtacttcgtgaagatccagtccttcctgggcggagcccctaccgaggacctgaaagctctgagccagcagaacgtgtccatggatctggccacctttatgaagctgcggaccgacgccgtgctgcctctgacagtggctgaggtgcagaaactgctgggcccccatgtggaagggctgaaggccgaagaacggcacagacccgtgcgcgactggatcctgaggcagagacaggatgacctggacacactgggcctgggactgcaggggggcatccctaatggctacctggtgctggacctgagcatgcaggaagccctgggatccggcagaatcttcaacgcccactacgccggctacttcgccgacctgctgatccacgacatcgagacaaaccctggccccacccctggaacccagagccccttcttccttctgctgctgctgaccgtgctgactgtcgtgacaggctctggccacgccagctctacacctggcggcgagaaagagacaagcgccacccagagaagcagcgtgccaagcagcaccgagaagaacgccgtgtccatgaccagctccgtgctgagcagccactctcctggcagcggcagcagcacaacacagggccaggatgtgacactggcccctgccacagaacctgcctctggatctgccgccacctggggacaggacgtgacaagcgtgccagtgaccagacctgccctgggctctacaacaccccctgcccacgatgtgaccagcgcccctgataacaagcctgcccctggaagcacagcccctccagctcatggcgtgacctctgccccagataccagaccagccccaggatctacagccccacccgcacacggcgtgacaagtgcccctgacacaagacccgctccaggctctactgctcctcctgcccatggcgtgacaagcgctcccgatacaaggccagctcctggctccacagcaccaccagcacatggcgtgacatcagctcccgacactagacctgctcccggatcaaccgctccaccagctcacggcgtgaccagcgcacctgataccagacctgctctgggaagcaccgcccctcccgtgcacaatgtgacatctgcttccggcagcgccagcggctctgcctctacactggtgcacaacggcaccagcgccagagccacaacaaccccagccagcaagagcacccccttcagcatccctagccaccacagcgacacccctaccacactggccagccactccaccaagaccgatgcctctagcacccaccactccagcgtgccccctctgaccagcagcaaccacagcacaagcccccagctgtctaccggcgtctcattcttctttctgtccttccacatcagcaacctgcagttcaacagcagcctggaagatcccagcaccgactactaccaggaactgcagcgggatatcagcgagatgttcctgcaaatctacaagcagggcggcttcctgggcctgagcaacatcaagttcagacccggcagcgtggtggtgcagctgaccctggctttccgggaaggcaccatcaacgtgcacgacgtggaaacccagttcaaccagtacaagaccgaggccgccagccggtacaacctgaccatctccgatgtgtccgtgtccgacgtgcccttcccattctctgcccagtctggcgcaggcgtgccaggatggggaattgctctgctggtgctcgtgtgcgtgctggtggccctggccatcgtgtatctgattgccctggccgtgtgccagtgccggcggaagaattacggccagctggacatcttccccgccagagacacctaccaccccatgagcgagtaccccacataccacacccacggcagatacgtgccacccagctccaccgacagatccccctacgagaaagtgtctgccggcaacggcggcagctccctgagctacacaaatcctgccgtggccgctgcctccgccaacctg

SEQ ID NO: 52 - protein, 2039 aa, Artificial Sequence
  Synthetic Construct
MASGAAPEPERTPVGQGSWAHPGRTRGPSDRGFCVVSPARPAEEATSLEGALSGTRHSHPSVGRQHHAGPPSTSRPPRPWDTPCPPVYAETKHFLYSSGDKEQLRPSFLLSSLRPSLTGARRLVETIFLGSRPWMPGTPRRLPRLPQRYWQMRPLFLELLGNHAQCPYGVLLKTHCPLRAAVTPAAGVCAREKPQGSVAAPEEEDTDPRRLVQLLRQHSSPWQVYGFVRACLRRLVPPGLWGSRHNERRFLRNTKKFISLGKHAKLSLQELTWKMSVRDCAWLRRSPGVGCVPAAEHRLREEILAKFLHWLMSVYVVELLRSFFYVTETTFQKNRLFFYRKSVWSKLQSIGIRQHLKRVQLRELSEAEVRQHREARPALLTSRLRFIPKPDGLRPIVNMDYVVGARTFRREKRAERLTSRVKALFSVLNYERARRPGLLGASVLGLDDIHRAWRTFVLRVRAQDPPPELYFVKVAITGAYDTIPQDRLTEVIASIIKPQNTYCVRRYAVVQKAAHGHVRKAFKSHVSTLTDLQPYMRQFVAHLQETSPLRDAVVIEQSSSLNEASSGLFDVFLRFMCHHAVRIRGKSYVQCQGIPQGSILSTLLCSLCYGDMENKLFAGIRRDGLLLRLVDDFLLVTPHLTHAKTFLRTLVRGVPEYGCVVNLRKTVVNFPVEDEALGGTAFVQMPAHGLFPWCGLLLDTRTLEVQSDYSSYARTSIRASLTFNRGFKAGRNMRRKLFGVLRLKCHSLFLDLQVNSLQTVCTNIYKILLLQAYRFHACVLQLPFHQQVWKNPTFFLRVISDTASLCYSILKAKNAGMSLGAKGAAGPLPSEAVQWLCHQAFLLKLTRHRVTYVPLLGSLRTAQTQLSRKLPGTTLTALEAAANPALPSDFKTILDGSGEGRGSLLTCGDVEENPGPLAGETGQEAAPLDGVLANPPNISSLSPRQLLGFPCAEVSGLSTERVRELAVALAQKNVKLSTEQLRCLAHRLSEPPEDLDALPLDLLLFLNPDAFSGPQACTRFFSRITKANVDLLPRGAPERQRLLPAALACWGVRGSLLSEADVRALGGLACDLPGRFVAESAEVLLPRLVSCPGPLDQDQQEAARAALQGGGPPYGPPSTWSVSTMDALRGLLPVLGQPIIRSIPQGIVAAWRQRSSRDPSWRQPERTILRPRFRREVEKTACPSGKKAREIDESLIFYKKWELEACVDAALLATQMDRVNAIPFTYEQLDVLKHKLDELYPQGYPESVIQHLGYLFLKMSPEDIRKWNVTSLETLKALLEVNKGHEMSPQVATLIDRFVKGRGQLDKDTLDTLTAFYPGYLCSLSPEELSSVPPSSIWAVRPQDLDTCDPRQLDVLYPKARLAFQNMNGSEYFVKIQSFLGGAPTEDLKALSQQNVSMDLATFMKLRTDAVLPLTVAEVQKLLGPHVEGLKAEERHRPVRDWILRQRQDDLDTLGLGLQGGIPNGYLVLDLSMQEALGSGRIFNAHYAGYFADLLIHDIETNPGPTPGTQSPFFLLLLLTVLTVVTGSGHASSTPGGEKETSATQRSSVPSSTEKNAVSMTSSVLSSHSPGSGSSTTQGQDVTLAPATEPASGSAATWGQDVTSVPVTRPALGSTTPPAHDVTSAPDNKPAPGSTAPPAHGVTSAPDTRPAPGSTAPPAHGVTSAPDTRPAPGSTAPPAHGVTSAPDTRPAPGSTAPPAHGVTSAPDTRPAPGSTAPPAHGVTSAPDTRPALGSTAPPVHNVTSASGSASGSASTLVHNGTSARATTTPASKSTPFSIPSHHSDTPTTLASHSTKTDASSTHHSSVPPLTSSNHSTSPQLSTGVSFFFLSFHISNLQFNSSLEDPSTDYYQELQRDISEMFLQIYKQGGFLGLSNIKFRPGSVVVQLTLAFREGTINVHDVETQFNQYKTEAASRYNLTISDVSVSDVPFPFSAQSGAGVPGWGIALLVLVCVLVALAIVYLIALAVCQCRRKNYGQLDIFPARDTYHPMSEYPTYHTHGRYVPPSSTDRSPYEKVSAGNGGSSLSYTNPAVAAASANL

SEQ ID NO: 53 - DNA, 6138 bp, Artificial Sequence
  Synthetic Construct
atggctagcggagctgccccggagccggagaggacccccgttggccagggatcgtgggcccatccgggacgcaccaggggaccatccgacaggggattctgtgtggtgtcaccggccaggccagcagaagaggcaaccagcctcgagggagcgttgtctggaaccagacattcccacccgtcggtgggccggcagcaccacgcgggaccaccgtccacttccagaccgccacggccatgggacaccccttgcccgcctgtgtatgccgagactaaacacttcctgtactcatccggagacaaggaacagcttcggccgtccttcctcctgtcgtcgctcagaccgagcctgaccggagcacgcagattggtggaaactatcttccttgggtcacgtccgtggatgccaggtaccccacggcgcctcccgcgcctcccacagagatactggcagatgcggcctctgttcctggaattgctgggaaaccacgctcagtgcccgtacggagtcctgctcaagactcactgccctctgagggcggcggtcactccggcggccggagtgtgcgcacgggagaagccccagggaagcgtggcagctccggaagaggaggacaccgatccgcgccgcctcgtgcaacttctgcgccagcactcctcgccctggcaagtctacgggttcgtccgcgcctgcctgcgccgcctggtgccgcctgggctctggggttcccggcataacgagcgccgcttcctgagaaatactaagaagtttatctcacttggaaaacatgccaagttgtcgctgcaagaactcacgtggaagatgtcagtccgcgattgcgcctggctgcgccgctcgccgggcgtcgggtgtgttccagctgcagaacaccgcctgagagaagaaattctggccaaatttctgcattggctgatgtcagtgtacgtggtcgagctgctgcgctcctttttctacgtcactgagactacctttcaaaagaaccgcctgttcttctaccgcaaatctgtgtggagcaagctgcagtcaatcggcattcgccagcatctgaagagggtgcagctgcgggaactttccgaggcagaagtccgccagcaccgggaggcccggccggcgcttctcacgtcgcgtctgagattcatcccaaagcccgacgggctgaggcctatcgtcaacatggattacgtcgtgggcgctcgcacctttcgccgtgaaaagcgggccgaacgcttgacctcacgggtgaaggccctcttctccgtgctgaactacgagagagcaagacggcctggcctgctgggagcttcggtgctgggactggacgatatccaccgggcttggcggacctttgttctccgggtgagagcccaagaccctccgccggaactgtacttcgtgaaggtggcgatcaccggagcctatgatactattccgcaagatcgactcaccgaagtcatcgcctcgatcatcaaaccgcagaacacttactgcgtcaggcggtacgccgtggtccagaaggccgcgcatggccacgtgagaaaggcgttcaagtcgcacgtgtccactctcaccgacctccagccttacatgaggcaattcgttgcgcatttgcaagagacttcgcccctgagagatgcggtggtcatcgagcagagctccagcctgaacgaagcgagcagcggtctgtttgacgtgttcctccgcttcatgtgtcatcacgcggtgcgaatcaggggaaaatcatacgtgcagtgccagggaatcccacaaggcagcattctgtcgactctcttgtgttccctttgctacggcgatatggaaaacaagctgttcgctgggatcagacgggacgggttgctgctcagactggtggacgacttcctgctggtgactccgcacctcactcacgccaaaacctttctccgcactctggtgaggggagtgccagaatacggctgtgtggtcaatctccggaaaactgtggtgaatttccctgtcgaggatgaggcactcggaggaaccgcatttgtccaaatgccagcacatggcctgttcccatggtgcggtctgctgctggacacccgaactcttgaagtgcagtccgactactccagctatgcccggacgagcatccgcgccagcctcactttcaatcgcggctttaaggccggacgaaacatgcgcagaaagcttttcggagtcctccggcttaaatgccattcgctctttctcgatctccaagtcaattcgctgcagaccgtgtgcacgaacatctacaagatcctgctgctccaagcctaccggttccacgcttgcgtgcttcagctgccgtttcaccaacaggtgtggaagaacccgaccttctttctgcgggtcattagcgatactgcctccctgtgttactcaatcctcaaggcaaagaacgccggaatgtcgctgggtgcgaaaggagccgcgggacctcttcctagcgaagcggtgcagtggctctgccaccaggctttcctcctgaagctgaccaggcacagagtgacctacgtcccgctgctgggctcgctgcgcactgcacagacccagctgtctagaaaactccccggcaccaccctgaccgctctggaagccgccgccaacccagcattgccgtcagatttcaagaccatcttggacggatccggcacaatcctgtctgagggcgccaccaacttcagcctgctgaaactggccggcgacgtggaactgaaccctggccctacccctggaacccagagccccttcttccttctgctgctgctgaccgtgctgactgtcgtgacaggctctggccacgccagctctacacctggcggcgagaaagagacaagcgccacccagagaagcagcgtgccaagcagcaccgagaagaacgccgtgtccatgaccagctccgtgctgagcagccactctcctggcagcggcagcagcacaacacagggccaggatgtgacactggcccctgccacagaacctgcctctggatctgccgccacctggggacaggacgtgacaagcgtgccagtgaccagacctgccctgggctctacaacaccccctgcccacgatgtgaccagcgcccctgataacaagcctgcccctggaagcacagcccctccagctcatggcgtgacctctgccccagataccagaccagccccaggatctacagccccacccgcacacggcgtgacaagtgcccctgacacaagacccgctccaggctctactgctcctcctgcccatggcgtgacaagcgctcccgatacaaggccagctcctggctccacagcaccaccagcacatggcgtgacatcagctcccgacactagacctgctcccggatcaaccgctccaccagctcacggcgtgaccagcgcacctgataccagacctgctctgggaagcaccgcccctcccgtgcacaatgtgacatctgcttccggcagcgccagcggctctgcctctacactggtgcacaacggcaccagcgccagagccacaacaaccccagccagcaagagcacccccttcagcatccctagccaccacagcgacacccctaccacactggccagccactccaccaagaccgatgcctctagcacccaccactccagcgtgccccctctgaccagcagcaaccacagcacaagcccccagctgtctaccggcgtctcattcttctttctgtccttccacatcagcaacctgcagttcaacagcagcctggaagatcccagcaccgactactaccaggaactgcagcgggatatcagcgagatgttcctgcaaatctacaagcagggcggcttcctgggcctgagcaacatcaagttcagacccggcagcgtggtggtgcagctgaccctggctttccgggaaggcaccatcaacgtgcacgacgtggaaacccagttcaaccagtacaagaccgaggccgccagccggtacaacctgaccatctccgatgtgtccgtgtccgacgtgcccttcccattctctgcccagtctggcgcaggcgtgccaggatggggaattgctctgctggtgctcgtgtgcgtgctggtggccctggccatcgtgtatctgattgccctggccgtgtgccagtgccggcggaagaattacggccagctggacatcttccccgccagagacacctaccaccccatgagcgagtaccccacataccacacccacggcagatacgtgccacccagctccaccgacagatccccctacgagaaagtgtctgccggcaacggcggcagctccctgagctacacaaatcctgccgtggccgctgcctccgccaacctgggatccggcagaatcttcaacgcccactacgccggctacttcgccgacctgctgatccacgacatcgagacaaaccctggccccctggctggcgagacaggacaggaagccgctcctctggacggcgtgctggccaaccctcccaatatcagcagcctgagccccagacagctgctgggattcccttgtgccgaggtgtccggcctgagcacagagagagtgcgggaactggctgtggccctggcccagaaaaacgtgaagctgagcaccgagcagctgcggtgcctggcccacagactgtctgagcctcccgaggatctggacgccctgcctctggatctgctgctgttcctgaaccccgacgccttcagcggacctcaggcctgcacccggttcttcagcagaatcaccaaggccaacgtggacctgctgcccagaggcgcccctgagagacagagactgctgcctgctgctctggcctgttggggagtgcggggctctctgctgtctgaagctgatgtgcgggccctgggaggcctggcttgtgatctgcctggaagattcgtggccgagagcgccgaagtgctgctgcctagactggtgtcctgtcccggccctctggaccaggatcagcaggaagctgccagagctgctctgcagggcggaggccctccttatggacctcctagcacttggagcgtgtccaccatggatgccctgaggggcctgctgccagtgctgggccagcctatcatcagatccatcccacagggcatcgtggccgcctggcggcagagaagctctagagatccctcttggcggcagcccgagcggacaatcctgcggcccaggtttcggagagaggtggaaaagaccgcctgcccctctggcaagaaggccagagagatcgacgagagcctgatcttctacaagaagtgggagctggaagcctgcgtggacgccgctctgctggccacccagatggacagagtgaacgccatccccttcacctatgagcagctggacgtgctgaagcacaagctggatgagctgtacccccagggctaccccgagagcgtgatccagcacctgggctacctgtttctgaagatgagccccgaggacatccggaagtggaacgtgaccagcctggaaaccctgaaggccctgctggaagtgaacaagggccacgagatgtccccccaggtggccacactgatcgacagattcgtgaagggcagaggccagctggacaaggacaccctggatacactgaccgccttctaccccggctatctgtgcagcctgtcccccgaggaactgagcagcgtgccacctagctctatctgggctgtgcggccccaggacctggatacctgcgatcctagacagctggatgtgctgtatcccaaggcccggctggccttccagaacatgaacggcagcgagtacttcgtgaagatccagtccttcctgggcggagcccctaccgaggacctgaaagctctgagccagcagaacgtgtccatggatctggccacctttatgaagctgcggaccgacgccgtgctgcctctgacagtggctgaggtgcagaaactgctgggcccccatgtggaagggctgaaggccgaagaacggcacagacccgtgcgcgactggatcctgaggcagagacaggatgacctggacacactgggcctgggactgcaggggggcatccctaatggctacctggtgctggacctgagcatgcaggaagccctg

SEQ ID NO: 54 - protein, 2046 aa, Artificial Sequence
  Synthetic Construct
MASGAAPEPERTPVGQGSWAHPGRTRGPSDRGFCVVSPARPAEEATSLEGALSGTRHSHPSVGRQHHAGPPSTSRPPRPWDTPCPPVYAETKHFLYSSGDKEQLRPSFLLSSLRPSLTGARRLVETIFLGSRPWMPGTPRRLPRLPQRYWQMRPLFLELLGNHAQCPYGVLLKTHCPLRAAVTPAAGVCAREKPQGSVAAPEEEDTDPRRLVQLLRQHSSPWQVYGFVRACLRRLVPPGLWGSRHNERRFLRNTKKFISLGKHAKLSLQELTWKMSVRDCAWLRRSPGVGCVPAAEHRLREEILAKFLHWLMSVYVVELLRSFFYVTETTFQKNRLFFYRKSVWSKLQSIGIRQHLKRVQLRELSEAEVRQHREARPALLTSRLRFIPKPDGLRPIVNMDYVVGARTFRREKRAERLTSRVKALFSVLNYERARRPGLLGASVLGLDDIHRAWRTFVLRVRAQDPPPELYFVKVAITGAYDTIPQDRLTEVIASIIKPQNTYCVRRYAVVQKAAHGHVRKAFKSHVSTLTDLQPYMRQFVAHLQETSPLRDAVVIEQSSSLNEASSGLFDVFLRFMCHHAVRIRGKSYVQCQGIPQGSILSTLLCSLCYGDMENKLFAGIRRDGLLLRLVDDFLLVTPHLTHAKTFLRTLVRGVPEYGCVVNLRKTVVNFPVEDEALGGTAFVQMPAHGLFPWCGLLLDTRTLEVQSDYSSYARTSIRASLTFNRGFKAGRNMRRKLFGVLRLKCHSLFLDLQVNSLQTVCTNIYKILLLQAYRFHACVLQLPFHQQVWKNPTFFLRVISDTASLCYSILKAKNAGMSLGAKGAAGPLPSEAVQWLCHQAFLLKLTRHRVTYVPLLGSLRTAQTQLSRKLPGTTLTALEAAANPALPSDFKTILDGSGTILSEGATNFSLLKLAGDVELNPGPTPGTQSPFFLLLLLTVLTVVTGSGHASSTPGGEKETSATQRSSVPSSTEKNAVSMTSSVLSSHSPGSGSSTTQGQDVTLAPATEPASGSAATWGQDVTSVPVTRPALGSTTPPAHDVTSAPDNKPAPGSTAPPAHGVTSAPDTRPAPGSTAPPAHGVTSAPDTRPAPGSTAPPAHGVTSAPDTRPAPGSTAPPAHGVTSAPDTRPAPGSTAPPAHGVTSAPDTRPALGSTAPPVHNVTSASGSASGSASTLVHNGTSARATTTPASKSTPFSIPSHHSDTPTTLASHSTKTDASSTHHSSVPPLTSSNHSTSPQLSTGVSFFFLSFHISNLQFNSSLEDPSTDYYQELQRDISEMFLQIYKQGGFLGLSNIKFRPGSVVVQLTLAFREGTINVHDVETQFNQYKTEAASRYNLTISDVSVSDVPFPFSAQSGAGVPGWGIALLVLVCVLVALAIVYLIALAVCQCRRKNYGQLDIFPARDTYHPMSEYPTYHTHGRYVPPSSTDRSPYEKVSAGNGGSSLSYTNPAVAAASANLGSGRIFNAHYAGYFADLLIHDIETNPGPLAGETGQEAAPLDGVLANPPNISSLSPRQLLGFPCAEVSGLSTERVRELAVALAQKNVKLSTEQLRCLAHRLSEPPEDLDALPLDLLLFLNPDAFSGPQACTRFFSRITKANVDLLPRGAPERQRLLPAALACWGVRGSLLSEADVRALGGLACDLPGRFVAESAEVLLPRLVSCPGPLDQDQQEAARAALQGGGPPYGPPSTWSVSTMDALRGLLPVLGQPIIRSIPQGIVAAWRQRSSRDPSWRQPERTILRPRFRREVEKTACPSGKKAREIDESLIFYKKWELEACVDAALLATQMDRVNAIPFTYEQLDVLKHKLDELYPQGYPESVIQHLGYLFLKMSPEDIRKWNVTSLETLKALLEVNKGHEMSPQVATLIDRFVKGRGQLDKDTLDTLTAFYPGYLCSLSPEELSSVPPSSIWAVRPQDLDTCDPRQLDVLYPKARLAFQNMNGSEYFVKIQSFLGGAPTEDLKALSQQNVSMDLATFMKLRTDAVLPLTVAEVQKLLGPHVEGLKAEERHRPVRDWILRQRQDDLDTLGLGLQGGIPNGYLVLDLSMQEAL

SEQ ID NO: 55 - DNA, 5214 bp, Artificial Sequence
  Synthetic Construct
atggctagcacccctggaacccagagccccttcttccttctgctgctgctgaccgtgctgactgtcgtgacaggctctggccacgccagctctacacctggcggcgagaaagagacaagcgccacccagagaagcagcgtgccaagcagcaccgagaagaacgccgtgtccatgaccagctccgtgctgagcagccactctcctggcagcggcagcagcacaacacagggccaggatgtgacactggcccctgccacagaacctgcctctggatctgccgccacctggggacaggacgtgacaagcgtgccagtgaccagacctgccctgggctctacaacaccccctgcccacgatgtgaccagcgcccctgataacaagcctgcccctggaagcacagcccctccagctcatggcgtgacctctgccccagataccagaccagccccaggatctacagccccacccgcacacggcgtgacaagtgcccctgacacaagacccgctccaggctctactgctcctcctgcccatggcgtgacaagcgctcccgatacaaggccagctcctggctccacagcaccaccagcacatggcgtgacatcagctcccgacactagacctgctcccggatcaaccgctccaccagctcacggcgtgaccagcgcacctgataccagacctgctctgggaagcaccgcccctcccgtgcacaatgtgacatctgcttccggcagcgccagcggctctgcctctacactggtgcacaacggcaccagcgccagagccacaacaaccccagccagcaagagcacccccttcagcatccctagccaccacagcgacacccctaccacactggccagccactccaccaagaccgatgcctctagcacccaccactccagcgtgccccctctgaccagcagcaaccacagcacaagcccccagctgtctaccggcgtctcattcttctttctgtccttccacatcagcaacctgcagttcaacagcagcctggaagatcccagcaccgactactaccaggaactgcagcgggatatcagcgagatgttcctgcaaatctacaagcagggcggcttcctgggcctgagcaacatcaagttcagacccggcagcgtggtggtgcagctgaccctggctttccgggaaggcaccatcaacgtgcacgacgtggaaacccagttcaaccagtacaagaccgaggccgccagccggtacaacctgaccatctccgatgtgtccgtgtccgacgtgcccttcccattctctgcccagtctggcgcaggcgtgccaggatggggaattgctctgctggtgctcgtgtgcgtgctggtggccctggccatcgtgtatctgattgccctggccgtgtgccagtgccggcggaagaattacggccagctggacatcttccccgccagagacacctaccaccccatgagcgagtaccccacataccacacccacggcagatacgtgccacccagctccaccgacagatccccctacgagaaagtgtctgccggcaacggcggcagctccctgagctacacaaatcctgccgtggccgctgcctccgccaacctgggatccggcagaatcttcaacgcccactacgccggctacttcgccgacctgctgatccacgacatcgagacaaaccctggccccctggctggcgagacaggacaggaagccgctcctctggacggcgtgctggccaaccctcccaatatcagcagcctgagccccagacagctgctgggattcccttgtgccgaggtgtccggcctgagcacagagagagtgcgggaactggctgtggccctggcccagaaaaacgtgaagctgagcaccgagcagctgcggtgcctggcccacagactgtctgagcctcccgaggatctggacgccctgcctctggatctgctgctgttcctgaaccccgacgccttcagcggacctcaggcctgcacccggttcttcagcagaatcaccaaggccaacgtggacctgctgcccagaggcgcccctgagagacagagactgctgcctgctgctctggcctgttggggagtgcggggctctctgctgtctgaagctgatgtgcgggccctgggaggcctggcttgtgatctgcctggaagattcgtggccgagagcgccgaagtgctgctgcctagactggtgtcctgtcccggccctctggaccaggatcagcaggaagctgccagagctgctctgcagggcggaggccctccttatggacctcctagcacttggagcgtgtccaccatggatgccctgaggggcctgctgccagtgctgggccagcctatcatcagatccatcccacagggcatcgtggccgcctggcggcagagaagctctagagatccctcttggcggcagcccgagcggacaatcctgcggcccaggtttcggagagaggtggaaaagaccgcctgcccctctggcaagaaggccagagagatcgacgagagcctgatcttctacaagaagtgggagctggaagcctgcgtggacgccgctctgctggccacccagatggacagagtgaacgccatccccttcacctatgagcagctggacgtgctgaagcacaagctggatgagctgtacccccagggctaccccgagagcgtgatccagcacctgggctacctgtttctgaagatgagccccgaggacatccggaagtggaacgtgaccagcctggaaaccctgaaggccctgctggaagtgaacaagggccacgagatgtccccccaggtggccacactgatcgacagattcgtgaagggcagaggccagctggacaaggacaccctggatacactgaccgccttctaccccggctatctgtgcagcctgtcccccgaggaactgagcagcgtgccacctagctctatctgggctgtgcggccccaggacctggatacctgcgatcctagacagctggatgtgctgtatcccaaggcccggctggccttccagaacatgaacggcagcgagtacttcgtgaagatccagtccttcctgggcggagcccctaccgaggacctgaaagctctgagccagcagaacgtgtccatggatctggccacctttatgaagctgcggaccgacgccgtgctgcctctgacagtggctgaggtgcagaaactgctgggcccccatgtggaagggctgaaggccgaagaacggcacagacccgtgcgcgactggatcctgaggcagagacaggatgacctggacacactgggcctgggactgcaggggggcatccctaatggctacctggtgctggacctgagcatgcaggaagccctgggatccggcgagggcagaggcagcctgctgacatgtggcgacgtggaagagaaccctggccccgccaaatttctgcattggctgatgtcagtgtacgtggtcgagctgctgcgctcctttttctacgtcactgagactacctttcaaaagaaccgcctgttcttctaccgcaaatctgtgtggagcaagctgcagtcaatcggcattcgccagcatctgaagagggtgcagctgcgggaactttccgaggcagaagtccgccagcaccgggaggcccggccggcgcttctcacgtcgcgtctgagattcatcccaaagcccgacgggctgaggcctatcgtcaacatggattacgtcgtgggcgctcgcacctttcgccgtgaaaagcgggccgaacgcttgacctcacgggtgaaggccctcttctccgtgctgaactacgagagagcaagacggcctggcctgctgggagcttcggtgctgggactggacgatatccaccgggcttggcggacctttgttctccgggtgagagcccaagaccctccgccggaactgtacttcgtgaaggtggcgatcaccggagcctatgatactattccgcaagatcgactcaccgaagtcatcgcctcgatcatcaaaccgcagaacacttactgcgtcaggcggtacgccgtggtccagaaggccgcgcatggccacgtgagaaaggcgttcaagtcgcacgtgtccactctcaccgacctccagccttacatgaggcaattcgttgcgcatttgcaagagacttcgcccctgagagatgcggtggtcatcgagcagagctccagcctgaacgaagcgagcagcggtctgtttgacgtgttcctccgcttcatgtgtcatcacgcggtgcgaatcaggggaaaatcatacgtgcagtgccagggaatcccacaaggcagcattctgtcgactctcttgtgttccctttgctacggcgatatggaaaacaagctgttcgctgggatcagacgggacgggttgctgctcagactggtggacgacttcctgctggtgactccgcacctcactcacgccaaaacctttctccgcactctggtgaggggagtgccagaatacggctgtgtggtcaatctccggaaaactgtggtgaatttccctgtcgaggatgaggcactcggaggaaccgcatttgtccaaatgccagcacatggcctgttcccatggtgcggtctgctgctggacacccgaactcttgaagtgcagtccgactactccagctatgcccggacgagcatccgcgccagcctcactttcaatcgcggctttaaggccggacgaaacatgcgcagaaagcttttcggagtcctccggcttaaatgccattcgctctttctcgatctccaagtcaattcgctgcagaccgtgtgcacgaacatctacaagatcctgctgctccaagcctaccggttccacgcttgcgtgcttcagctgccgtttcaccaacaggtgtggaagaacccgaccttctttctgcgggtcattagcgatactgcctccctgtgttactcaatcctcaaggcaaagaacgccggaatgtcgctgggtgcgaaaggagccgcgggacctcttcctagcgaagcggtgcagtggctctgccaccaggctttcctcctgaagctgaccaggcacagagtgacctacgtcccgctgctgggctcgctgcgcactgcacagacccagctgtctagaaaactccccggcaccaccctgaccgctctggaagccgccgccaacccagcattgccgtcagatttcaagaccatcttggac

SEQ ID NO: 56 - protein, 1738 aa, Artificial Sequence
  Synthetic Construct
MASTPGTQSPFFLLLLLTVLTVVTGSGHASSTPGGEKETSATQRSSVPSSTEKNAVSMTSSVLSSHSPGSGSSTTQGQDVTLAPATEPASGSAATWGQDVTSVPVTRPALGSTTPPAHDVTSAPDNKPAPGSTAPPAHGVTSAPDTRPAPGSTAPPAHGVTSAPDTRPAPGSTAPPAHGVTSAPDTRPAPGSTAPPAHGVTSAPDTRPAPGSTAPPAHGVTSAPDTRPALGSTAPPVHNVTSASGSASGSASTLVHNGTSARATTTPASKSTPFSIPSHHSDTPTTLASHSTKTDASSTHHSSVPPLTSSNHSTSPQLSTGVSFFFLSFHISNLQFNSSLEDPSTDYYQELQRDISEMFLQIYKQGGFLGLSNIKFRPGSVVVQLTLAFREGTINVHDVETQFNQYKTEAASRYNLTISDVSVSDVPFPFSAQSGAGVPGWGIALLVLVCVLVALAIVYLIALAVCQCRRKNYGQLDIFPARDTYHPMSEYPTYHTHGRYVPPSSTDRSPYEKVSAGNGGSSLSYTNPAVAAASANLGSGRIFNAHYAGYFADLLIHDIETNPGPLAGETGQEAAPLDGVLANPPNISSLSPRQLLGFPCAEVSGLSTERVRELAVALAQKNVKLSTEQLRCLAHRLSEPPEDLDALPLDLLLFLNPDAFSGPQACTRFFSRITKANVDLLPRGAPERQRLLPAALACWGVRGSLLSEADVRALGGLACDLPGRFVAESAEVLLPRLVSCPGPLDQDQQEAARAALQGGGPPYGPPSTWSVSTMDALRGLLPVLGQPIIRSIPQGIVAAWRQRSSRDPSWRQPERTILRPRFRREVEKTACPSGKKAREIDESLIFYKKWELEACVDAALLATQMDRVNAIPFTYEQLDVLKHKLDELYPQGYPESVIQHLGYLFLKMSPEDIRKWNVTSLETLKALLEVNKGHEMSPQVATLIDRFVKGRGQLDKDTLDTLTAFYPGYLCSLSPEELSSVPPSSIWAVRPQDLDTCDPRQLDVLYPKARLAFQNMNGSEYFVKIQSFLGGAPTEDLKALSQQNVSMDLATFMKLRTDAVLPLTVAEVQKLLGPHVEGLKAEERHRPVRDWILRQRQDDLDTLGLGLQGGIPNGYLVLDLSMQEALGSGEGRGSLLTCGDVEENPGPAKFLHWLMSVYVVELLRSFFYVTETTFQKNRLFFYRKSVWSKLQSIGIRQHLKRVQLRELSEAEVRQHREARPALLTSRLRFIPKPDGLRPIVNMDYVVGARTFRREKRAERLTSRVKALFSVLNYERARRPGLLGASVLGLDDIHRAWRTFVLRVRAQDPPPELYFVKVAITGAYDTIPQDRLTEVIASIIKPQNTYCVRRYAVVQKAAHGHVRKAFKSHVSTLTDLQPYMRQFVAHLQETSPLRDAVVIEQSSSLNEASSGLFDVFLRFMCHHAVRIRGKSYVQCQGIPQGSILSTLLCSLCYGDMENKLFAGIRRDGLLLRLVDDFLLVTPHLTHAKTFLRTLVRGVPEYGCVVNLRKTVVNFPVEDEALGGTAFVQMPAHGLFPWCGLLLDTRTLEVQSDYSSYARTSIRASLTFNRGFKAGRNMRRKLFGVLRLKCHSLFLDLQVNSLQTVCTNIYKILLLQAYRFHACVLQLPFHQQVWKNPTFFLRVISDTASLCYSILKAKNAGMSLGAKGAAGPLPSEAVQWLCHQAFLLKLTRHRVTYVPLLGSLRTAQTQLSRKLPGTTLTALEAAANPALPSDFKTILD

SEQ ID NO: 57 - DNA, 5235 bp, Artificial Sequence
  Synthetic Construct
atggctagcctggctggcgagacaggacaggaagccgctcctctggacggcgtgctggccaaccctcccaatatcagcagcctgagccccagacagctgctgggattcccttgtgccgaggtgtccggcctgagcacagagagagtgcgggaactggctgtggccctggcccagaaaaacgtgaagctgagcaccgagcagctgcggtgcctggcccacagactgtctgagcctcccgaggatctggacgccctgcctctggatctgctgctgttcctgaaccccgacgccttcagcggacctcaggcctgcacccggttcttcagcagaatcaccaaggccaacgtggacctgctgcccagaggcgcccctgagagacagagactgctgcctgctgctctggcctgttggggagtgcggggctctctgctgtctgaagctgatgtgcgggccctgggaggcctggcttgtgatctgcctggaagattcgtggccgagagcgccgaagtgctgctgcctagactggtgtcctgtcccggccctctggaccaggatcagcaggaagctgccagagctgctctgcagggcggaggccctccttatggacctcctagcacttggagcgtgtccaccatggatgccctgaggggcctgctgccagtgctgggccagcctatcatcagatccatcccacagggcatcgtggccgcctggcggcagagaagctctagagatccctcttggcggcagcccgagcggacaatcctgcggcccaggtttcggagagaggtggaaaagaccgcctgcccctctggcaagaaggccagagagatcgacgagagcctgatcttctacaagaagtgggagctggaagcctgcgtggacgccgctctgctggccacccagatggacagagtgaacgccatccccttcacctatgagcagctggacgtgctgaagcacaagctggatgagctgtacccccagggctaccccgagagcgtgatccagcacctgggctacctgtttctgaagatgagccccgaggacatccggaagtggaacgtgaccagcctggaaaccctgaaggccctgctggaagtgaacaagggccacgagatgtccccccaggtggccacactgatcgacagattcgtgaagggcagaggccagctggacaaggacaccctggatacactgaccgccttctaccccggctatctgtgcagcctgtcccccgaggaactgagcagcgtgccacctagctctatctgggctgtgcggccccaggacctggatacctgcgatcctagacagctggatgtgctgtatcccaaggcccggctggccttccagaacatgaacggcagcgagtacttcgtgaagatccagtccttcctgggcggagcccctaccgaggacctgaaagctctgagccagcagaacgtgtccatggatctggccacctttatgaagctgcggaccgacgccgtgctgcctctgacagtggctgaggtgcagaaactgctgggcccccatgtggaagggctgaaggccgaagaacggcacagacccgtgcgcgactggatcctgaggcagagacaggatgacctggacacactgggcctgggactgcaggggggcatccctaatggctacctggtgctggacctgagcatgcaggaagccctgggatccggcagaatcttcaacgcccactacgccggctacttcgccgacctgctgatccacgacatcgagacaaaccctggccccacccctggaacccagagccccttcttccttctgctgctgctgaccgtgctgactgtcgtgacaggctctggccacgccagctctacacctggcggcgagaaagagacaagcgccacccagagaagcagcgtgccaagcagcaccgagaagaacgccgtgtccatgaccagctccgtgctgagcagccactctcctggcagcggcagcagcacaacacagggccaggatgtgacactggcccctgccacagaacctgcctctggatctgccgccacctggggacaggacgtgacaagcgtgccagtgaccagacctgccctgggctctacaacaccccctgcccacgatgtgaccagcgcccctgataacaagcctgcccctggaagcacagcccctccagctcatggcgtgacctctgccccagataccagaccagccccaggatctacagccccacccgcacacggcgtgacaagtgcccctgacacaagacccgctccaggctctactgctcctcctgcccatggcgtgacaagcgctcccgatacaaggccagctcctggctccacagcaccaccagcacatggcgtgacatcagctcccgacactagacctgctcccggatcaaccgctccaccagctcacggcgtgaccagcgcacctgataccagacctgctctgggaagcaccgcccctcccgtgcacaatgtgacatctgcttccggcagcgccagcggctctgcctctacactggtgcacaacggcaccagcgccagagccacaacaaccccagccagcaagagcacccccttcagcatccctagccaccacagcgacacccctaccacactggccagccactccaccaagaccgatgcctctagcacccaccactccagcgtgccccctctgaccagcagcaaccacagcacaagcccccagctgtctaccggcgtctcattcttctttctgtccttccacatcagcaacctgcagttcaacagcagcctggaagatcccagcaccgactactaccaggaactgcagcgggatatcagcgagatgttcctgcaaatctacaagcagggcggcttcctgggcctgagcaacatcaagttcagacccggcagcgtggtggtgcagctgaccctggctttccgggaaggcaccatcaacgtgcacgacgtggaaacccagttcaaccagtacaagaccgaggccgccagccggtacaacctgaccatctccgatgtgtccgtgtccgacgtgcccttcccattctctgcccagtctggcgcaggcgtgccaggatggggaattgctctgctggtgctcgtgtgcgtgctggtggccctggccatcgtgtatctgattgccctggccgtgtgccagtgccggcggaagaattacggccagctggacatcttccccgccagagacacctaccaccccatgagcgagtaccccacataccacacccacggcagatacgtgccacccagctccaccgacagatccccctacgagaaagtgtctgccggcaacggcggcagctccctgagctacacaaatcctgccgtggccgctgcctccgccaacctgggatccggcacaatcctgtctgagggcgccaccaacttcagcctgctgaaactggccggcgacgtggaactgaaccctggccctgccaaatttctgcattggctgatgtcagtgtacgtggtcgagctgctgcgctcctttttctacgtcactgagactacctttcaaaagaaccgcctgttcttctaccgcaaatctgtgtggagcaagctgcagtcaatcggcattcgccagcatctgaagagggtgcagctgcgggaactttccgaggcagaagtccgccagcaccgggaggcccggccggcgcttctcacgtcgcgtctgagattcatcccaaagcccgacgggctgaggcctatcgtcaacatggattacgtcgtgggcgctcgcacctttcgccgtgaaaagcgggccgaacgcttgacctcacgggtgaaggccctcttctccgtgctgaactacgagagagcaagacggcctggcctgctgggagcttcggtgctgggactggacgatatccaccgggcttggcggacctttgttctccgggtgagagcccaagaccctccgccggaactgtacttcgtgaaggtggcgatcaccggagcctatgatactattccgcaagatcgactcaccgaagtcatcgcctcgatcatcaaaccgcagaacacttactgcgtcaggcggtacgccgtggtccagaaggccgcgcatggccacgtgagaaaggcgttcaagtcgcacgtgtccactctcaccgacctccagccttacatgaggcaattcgttgcgcatttgcaagagacttcgcccctgagagatgcggtggtcatcgagcagagctccagcctgaacgaagcgagcagcggtctgtttgacgtgttcctccgcttcatgtgtcatcacgcggtgcgaatcaggggaaaatcatacgtgcagtgccagggaatcccacaaggcagcattctgtcgactctcttgtgttccctttgctacggcgatatggaaaacaagctgttcgctgggatcagacgggacgggttgctgctcagactggtggacgacttcctgctggtgactccgcacctcactcacgccaaaacctttctccgcactctggtgaggggagtgccagaatacggctgtgtggtcaatctccggaaaactgtggtgaatttccctgtcgaggatgaggcactcggaggaaccgcatttgtccaaatgccagcacatggcctgttcccatggtgcggtctgctgctggacacccgaactcttgaagtgcagtccgactactccagctatgcccggacgagcatccgcgccagcctcactttcaatcgcggctttaaggccggacgaaacatgcgcagaaagcttttcggagtcctccggcttaaatgccattcgctctttctcgatctccaagtcaattcgctgcagaccgtgtgcacgaacatctacaagatcctgctgctccaagcctaccggttccacgcttgcgtgcttcagctgccgtttcaccaacaggtgtggaagaacccgaccttctttctgcgggtcattagcgatactgcctccctgtgttactcaatcctcaaggcaaagaacgccggaatgtcgctgggtgcgaaaggagccgcgggacctcttcctagcgaagcggtgcagtggctctgccaccaggctttcctcctgaagctgaccaggcacagagtgacctacgtcccgctgctgggctcgctgcgcactgcacagacccagctgtctagaaaactccccggcaccaccctgaccgctctggaagccgccgccaacccagcattgccgtcagatttcaagaccatcttggac

SEQ ID NO: 58 - protein, 1745 aa, Artificial Sequence
  Synthetic Construct
MASLAGETGQEAAPLDGVLANPPNISSLSPRQLLGFPCAEVSGLSTERVRELAVALAQKNVKLSTEQLRCLAHRLSEPPEDLDALPLDLLLFLNPDAFSGPQACTRFFSRITKANVDLLPRGAPERQRLLPAALACWGVRGSLLSEADVRALGGLACDLPGRFVAESAEVLLPRLVSCPGPLDQDQQEAARAALQGGGPPYGPPSTWSVSTMDALRGLLPVLGQPIIRSIPQGIVAAWRQRSSRDPSWRQPERTILRPRFRREVEKTACPSGKKAREIDESLIFYKKWELEACVDAALLATQMDRVNAIPFTYEQLDVLKHKLDELYPQGYPESVIQHLGYLFLKMSPEDIRKWNVTSLETLKALLEVNKGHEMSPQVATLIDRFVKGRGQLDKDTLDTLTAFYPGYLCSLSPEELSSVPPSSIWAVRPQDLDTCDPRQLDVLYPKARLAFQNMNGSEYFVKIQSFLGGAPTEDLKALSQQNVSMDLATFMKLRTDAVLPLTVAEVQKLLGPHVEGLKAEERHRPVRDWILRQRQDDLDTLGLGLQGGIPNGYLVLDLSMQEALGSGRIFNAHYAGYFADLLIHDIETNPGPTPGTQSPFFLLLLLTVLTVVTGSGHASSTPGGEKETSATQRSSVPSSTEKNAVSMTSSVLSSHSPGSGSSTTQGQDVTLAPATEPASGSAATWGQDVTSVPVTRPALGSTTPPAHDVTSAPDNKPAPGSTAPPAHGVTSAPDTRPAPGSTAPPAHGVTSAPDTRPAPGSTAPPAHGVTSAPDTRPAPGSTAPPAHGVTSAPDTRPAPGSTAPPAHGVTSAPDTRPALGSTAPPVHNVTSASGSASGSASTLVHNGTSARATTTPASKSTPFSIPSHHSDTPTTLASHSTKTDASSTHHSSVPPLTSSNHSTSPQLSTGVSFFFLSFHISNLQFNSSLEDPSTDYYQELQRDISEMFLQIYKQGGFLGLSNIKFRPGSVVVQLTLAFREGTINVHDVETQFNQYKTEAASRYNLTISDVSVSDVPFPFSAQSGAGVPGWGIALLVLVCVLVALAIVYLIALAVCQCRRKNYGQLDIFPARDTYHPMSEYPTYHTHGRYVPPSSTDRSPYEKVSAGNGGSSLSYTNPAVAAASANLGSGTILSEGATNFSLLKLAGDVELNPGPAKFLHWLMSVYVVELLRSFFYVTETTFQKNRLFFYRKSVWSKLQSIGIRQHLKRVQLRELSEAEVRQHREARPALLTSRLRFIPKPDGLRPIVNMDYVVGARTFRREKRAERLTSRVKALFSVLNYERARRPGLLGASVLGLDDIHRAWRTFVLRVRAQDPPPELYFVKVAITGAYDTIPQDRLTEVIASIIKPQNTYCVRRYAVVQKAAHGHVRKAFKSHVSTLTDLQPYMRQFVAHLQETSPLRDAVVIEQSSSLNEASSGLFDVFLRFMCHHAVRIRGKSYVQCQGIPQGSILSTLLCSLCYGDMENKLFAGIRRDGLLLRLVDDFLLVTPHLTHAKTFLRTLVRGVPEYGCVVNLRKTVVNFPVEDEALGGTAFVQMPAHGLFPWCGLLLDTRTLEVQSDYSSYARTSIRASLTFNRGFKAGRNMRRKLFGVLRLKCHSLFLDLQVNSLQTVCTNIYKILLLQAYRFHACVLQLPFHQQVWKNPTFFLRVISDTASLCYSILKAKNAGMSLGAKGAAGPLPSEAVQWLCHQAFLLKLTRHRVTYVPLLGSLRTAQTQLSRKLPGTTLTALEAAANPALPSDFKTILD

SEQ ID NO: 59 - DNA, 5214 bp, Artificial Sequence
  Synthetic Construct
atggctagcctggctggcgagacaggacaggaagccgctcctctggacggcgtgctggccaaccctcccaatatcagcagcctgagccccagacagctgctgggattcccttgtgccgaggtgtccggcctgagcacagagagagtgcgggaactggctgtggccctggcccagaaaaacgtgaagctgagcaccgagcagctgcggtgcctggcccacagactgtctgagcctcccgaggatctggacgccctgcctctggatctgctgctgttcctgaaccccgacgccttcagcggacctcaggcctgcacccggttcttcagcagaatcaccaaggccaacgtggacctgctgcccagaggcgcccctgagagacagagactgctgcctgctgctctggcctgttggggagtgcggggctctctgctgtctgaagctgatgtgcgggccctgggaggcctggcttgtgatctgcctggaagattcgtggccgagagcgccgaagtgctgctgcctagactggtgtcctgtcccggccctctggaccaggatcagcaggaagctgccagagctgctctgcagggcggaggccctccttatggacctcctagcacttggagcgtgtccaccatggatgccctgaggggcctgctgccagtgctgggccagcctatcatcagatccatcccacagggcatcgtggccgcctggcggcagagaagctctagagatccctcttggcggcagcccgagcggacaatcctgcggcccaggtttcggagagaggtggaaaagaccgcctgcccctctggcaagaaggccagagagatcgacgagagcctgatcttctacaagaagtgggagctggaagcctgcgtggacgccgctctgctggccacccagatggacagagtgaacgccatccccttcacctatgagcagctggacgtgctgaagcacaagctggatgagctgtacccccagggctaccccgagagcgtgatccagcacctgggctacctgtttctgaagatgagccccgaggacatccggaagtggaacgtgaccagcctggaaaccctgaaggccctgctggaagtgaacaagggccacgagatgtccccccaggtggccacactgatcgacagattcgtgaagggcagaggccagctggacaaggacaccctggatacactgaccgccttctaccccggctatctgtgcagcctgtcccccgaggaactgagcagcgtgccacctagctctatctgggctgtgcggccccaggacctggatacctgcgatcctagacagctggatgtgctgtatcccaaggcccggctggccttccagaacatgaacggcagcgagtacttcgtgaagatccagtccttcctgggcggagcccctaccgaggacctgaaagctctgagccagcagaacgtgtccatggatctggccacctttatgaagctgcggaccgacgccgtgctgcctctgacagtggctgaggtgcagaaactgctgggcccccatgtggaagggctgaaggccgaagaacggcacagacccgtgcgcgactggatcctgaggcagagacaggatgacctggacacactgggcctgggactgcaggggggcatccctaatggctacctggtgctggacctgagcatgcaggaagccctgggatccggcgagggcagaggcagcctgctgacatgtggcgacgtggaagagaaccctggccccgccaaatttctgcattggctgatgtcagtgtacgtggtcgagctgctgcgctcctttttctacgtcactgagactacctttcaaaagaaccgcctgttcttctaccgcaaatctgtgtggagcaagctgcagtcaatcggcattcgccagcatctgaagagggtgcagctgcgggaactttccgaggcagaagtccgccagcaccgggaggcccggccggcgcttctcacgtcgcgtctgagattcatcccaaagcccgacgggctgaggcctatcgtcaacatggattacgtcgtgggcgctcgcacctttcgccgtgaaaagcgggccgaacgcttgacctcacgggtgaaggccctcttctccgtgctgaactacgagagagcaagacggcctggcctgctgggagcttcggtgctgggactggacgatatccaccgggcttggcggacctttgttctccgggtgagagcccaagaccctccgccggaactgtacttcgtgaaggtggcgatcaccggagcctatgatactattccgcaagatcgactcaccgaagtcatcgcctcgatcatcaaaccgcagaacacttactgcgtcaggcggtacgccgtggtccagaaggccgcgcatggccacgtgagaaaggcgttcaagtcgcacgtgtccactctcaccgacctccagccttacatgaggcaattcgttgcgcatttgcaagagacttcgcccctgagagatgcggtggtcatcgagcagagctccagcctgaacgaagcgagcagcggtctgtttgacgtgttcctccgcttcatgtgtcatcacgcggtgcgaatcaggggaaaatcatacgtgcagtgccagggaatcccacaaggcagcattctgtcgactctcttgtgttccctttgctacggcgatatggaaaacaagctgttcgctgggatcagacgggacgggttgctgctcagactggtggacgacttcctgctggtgactccgcacctcactcacgccaaaacctttctccgcactctggtgaggggagtgccagaatacggctgtgtggtcaatctccggaaaactgtggtgaatttccctgtcgaggatgaggcactcggaggaaccgcatttgtccaaatgccagcacatggcctgttcccatggtgcggtctgctgctggacacccgaactcttgaagtgcagtccgactactccagctatgcccggacgagcatccgcgccagcctcactttcaatcgcggctttaaggccggacgaaacatgcgcagaaagcttttcggagtcctccggcttaaatgccattcgctctttctcgatctccaagtcaattcgctgcagaccgtgtgcacgaacatctacaagatcctgctgctccaagcctaccggttccacgcttgcgtgcttcagctgccgtttcaccaacaggtgtggaagaacccgaccttctttctgcgggtcattagcgatactgcctccctgtgttactcaatcctcaaggcaaagaacgccggaatgtcgctgggtgcgaaaggagccgcgggacctcttcctagcgaagcggtgcagtggctctgccaccaggctttcctcctgaagctgaccaggcacagagtgacctacgtcccgctgctgggctcgctgcgcactgcacagacccagctgtctagaaaactccccggcaccaccctgaccgctctggaagccgccgccaacccagcattgccgtcagatttcaagaccatcttggacggatccggcacaatcctgtctgagggcgccaccaacttcagcctgctgaaactggccggcgacgtggaactgaaccctggccctacccctggaacccagagccccttcttccttctgctgctgctgaccgtgctgactgtcgtgacaggctctggccacgccagctctacacctggcggcgagaaagagacaagcgccacccagagaagcagcgtgccaagcagcaccgagaagaacgccgtgtccatgaccagctccgtgctgagcagccactctcctggcagcggcagcagcacaacacagggccaggatgtgacactggcccctgccacagaacctgcctctggatctgccgccacctggggacaggacgtgacaagcgtgccagtgaccagacctgccctgggctctacaacaccccctgcccacgatgtgaccagcgcccctgataacaagcctgcccctggaagcacagcccctccagctcatggcgtgacctctgccccagataccagaccagccccaggatctacagccccacccgcacacggcgtgacaagtgcccctgacacaagacccgctccaggctctactgctcctcctgcccatggcgtgacaagcgctcccgatacaaggccagctcctggctccacagcaccaccagcacatggcgtgacatcagctcccgacactagacctgctcccggatcaaccgctccaccagctcacggcgtgaccagcgcacctgataccagacctgctctgggaagcaccgcccctcccgtgcacaatgtgacatctgcttccggcagcgccagcggctctgcctctacactggtgcacaacggcaccagcgccagagccacaacaaccccagccagcaagagcacccccttcagcatccctagccaccacagcgacacccctaccacactggccagccactccaccaagaccgatgcctctagcacccaccactccagcgtgccccctctgaccagcagcaaccacagcacaagcccccagctgtctaccggcgtctcattcttctttctgtccttccacatcagcaacctgcagttcaacagcagcctggaagatcccagcaccgactactaccaggaactgcagcgggatatcagcgagatgttcctgcaaatctacaagcagggcggcttcctgggcctgagcaacatcaagttcagacccggcagcgtggtggtgcagctgaccctggctttccgggaaggcaccatcaacgtgcacgacgtggaaacccagttcaaccagtacaagaccgaggccgccagccggtacaacctgaccatctccgatgtgtccgtgtccgacgtgcccttcccattctctgcccagtctggcgcaggcgtgccaggatggggaattgctctgctggtgctcgtgtgcgtgctggtggccctggccatcgtgtatctgattgccctggccgtgtgccagtgccggcggaagaattacggccagctggacatcttccccgccagagacacctaccaccccatgagcgagtaccccacataccacacccacggcagatacgtgccacccagctccaccgacagatccccctacgagaaagtgtctgccggcaacggcggcagctccctgagctacacaaatcctgccgtggccgctgcctccgccaacctg

SEQ ID NO: 60 - protein, 1738 aa, Artificial Sequence
  Synthetic Construct
MASLAGETGQEAAPLDGVLANPPNISSLSPRQLLGFPCAEVSGLSTERVRELAVALAQKNVKLSTEQLRCLAHRLSEPPEDLDALPLDLLLFLNPDAFSGPQACTRFFSRITKANVDLLPRGAPERQRLLPAALACWGVRGSLLSEADVRALGGLACDLPGRFVAESAEVLLPRLVSCPGPLDQDQQEAARAALQGGGPPYGPPSTWSVSTMDALRGLLPVLGQPIIRSIPQGIVAAWRQRSSRDPSWRQPERTILRPRFRREVEKTACPSGKKAREIDESLIFYKKWELEACVDAALLATQMDRVNAIPFTYEQLDVLKHKLDELYPQGYPESVIQHLGYLFLKMSPEDIRKWNVTSLETLKALLEVNKGHEMSPQVATLIDRFVKGRGQLDKDTLDTLTAFYPGYLCSLSPEELSSVPPSSIWAVRPQDLDTCDPRQLDVLYPKARLAFQNMNGSEYFVKIQSFLGGAPTEDLKALSQQNVSMDLATFMKLRTDAVLPLTVAEVQKLLGPHVEGLKAEERHRPVRDWILRQRQDDLDTLGLGLQGGIPNGYLVLDLSMQEALGSGEGRGSLLTCGDVEENPGPAKFLHWLMSVYVVELLRSFFYVTETTFQKNRLFFYRKSVWSKLQSIGIRQHLKRVQLRELSEAEVRQHREARPALLTSRLRFIPKPDGLRPIVNMDYVVGARTFRREKRAERLTSRVKALFSVLNYERARRPGLLGASVLGLDDIHRAWRTFVLRVRAQDPPPELYFVKVAITGAYDTIPQDRLTEVIASIIKPQNTYCVRRYAVVQKAAHGHVRKAFKSHVSTLTDLQPYMRQFVAHLQETSPLRDAVVIEQSSSLNEASSGLFDVFLRFMCHHAVRIRGKSYVQCQGIPQGSILSTLLCSLCYGDMENKLFAGIRRDGLLLRLVDDFLLVTPHLTHAKTFLRTLVRGVPEYGCVVNLRKTVVNFPVEDEALGGTAFVQMPAHGLFPWCGLLLDTRTLEVQSDYSSYARTSIRASLTFNRGFKAGRNMRRKLFGVLRLKCHSLFLDLQVNSLQTVCTNIYKILLLQAYRFHACVLQLPFHQQVWKNPTFFLRVISDTASLCYSILKAKNAGMSLGAKGAAGPLPSEAVQWLCHQAFLLKLTRHRVTYVPLLGSLRTAQTQLSRKLPGTTLTALEAAANPALPSDFKTILDGSGTILSEGATNFSLLKLAGDVELNPGPTPGTQSPFFLLLLLTVLTVVTGSGHASSTPGGEKETSATQRSSVPSSTEKNAVSMTSSVLSSHSPGSGSSTTQGQDVTLAPATEPASGSAATWGQDVTSVPVTRPALGSTTPPAHDVTSAPDNKPAPGSTAPPAHGVTSAPDTRPAPGSTAPPAHGVTSAPDTRPAPGSTAPPAHGVTSAPDTRPAPGSTAPPAHGVTSAPDTRPAPGSTAPPAHGVTSAPDTRPALGSTAPPVHNVTSASGSASGSASTLVHNGTSARATTTPASKSTPFSIPSHHSDTPTTLASHSTKTDASSTHHSSVPPLTSSNHSTSPQLSTGVSFFFLSFHISNLQFNSSLEDPSTDYYQELQRDISEMFLQIYKQGGFLGLSNIKFRPGSVVVQLTLAFREGTINVHDVETQFNQYKTEAASRYNLTISDVSVSDVPFPFSAQSGAGVPGWGIALLVLVCVLVALAIVYLIALAVCQCRRKNYGQLDIFPARDTYHPMSEYPTYHTHGRYVPPSSTDRSPYEKVSAGNGGSSLSYTNPAVAAASANL

SEQ ID NO: 61 - DNA, 5808 bp, Artificial Sequence
  Synthetic Construct
atggctagcacccctggaacccagagccccttcttccttctgctgctgctgaccgtgctgactgtcgtgacaggctctggccacgccagctctacacctggcggcgagaaagagacaagcgccacccagagaagcagcgtgccaagcagcaccgagaagaacgccgtgtccatgaccagctccgtgctgagcagccactctcctggcagcggcagcagcacaacacagggccaggatgtgacactggcccctgccacagaacctgcctctggatctgccgccacctggggacaggacgtgacaagcgtgccagtgaccagacctgccctgggctctacaacaccccctgcccacgatgtgaccagcgcccctgataacaagcctgcccctggaagcacagcccctccagctcatggcgtgacctctgccccagataccagaccagccccaggatctacagccccacccgcacacggcgtgacaagtgcccctgacacaagacccgctccaggctctactgctcctcctgcccatggcgtgacaagcgctcccgatacaaggccagctcctggctccacagcaccaccagcacatggcgtgacatcagctcccgacactagacctgctcccggatcaaccgctccaccagctcacggcgtgaccagcgcacctgataccagacctgctctgggaagcaccgcccctcccgtgcacaatgtgacatctgcttccggcagcgccagcggctctgcctctacactggtgcacaacggcaccagcgccagagccacaacaaccccagccagcaagagcacccccttcagcatccctagccaccacagcgacacccctaccacactggccagccactccaccaagaccgatgcctctagcacccaccactccagcgtgccccctctgaccagcagcaaccacagcacaagcccccagctgtctaccggcgtctcattcttctttctgtccttccacatcagcaacctgcagttcaacagcagcctggaagatcccagcaccgactactaccaggaactgcagcgggatatcagcgagatgttcctgcaaatctacaagcagggcggcttcctgggcctgagcaacatcaagttcagacccggcagcgtggtggtgcagctgaccctggctttccgggaaggcaccatcaacgtgcacgacgtggaaacccagttcaaccagtacaagaccgaggccgccagccggtacaacctgaccatctccgatgtgtccgtgtccgacgtgcccttcccattctctgcccagtctggcgcaggcgtgccaggatggggaattgctctgctggtgctcgtgtgcgtgctggtggccctggccatcgtgtatctgattgccctggccgtgtgccagtgccggcggaagaattacggccagctggacatcttccccgccagagacacctaccaccccatgagcgagtaccccacataccacacccacggcagatacgtgccacccagctccaccgacagatccccctacgagaaagtgtctgccggcaacggcggcagctccctgagctacacaaatcctgccgtggccgctgcctccgccaacctgggatccggcagaatcttcaacgcccactacgccggctacttcgccgacctgctgatccacgacatcgagacaaaccctggccccctggctggcgagacaggacaggaagccgctcctctggacggcgtgctggccaaccctcccaatatcagcagcctgagccccagacagctgctgggattcccttgtgccgaggtgtccggcctgagcacagagagagtgcgggaactggctgtggccctggcccagaaaaacgtgaagctgagcaccgagcagctgcggtgcctggcccacagactgtctgagcctcccgaggatctggacgccctgcctctggatctgctgctgttcctgaaccccgacgccttcagcggacctcaggcctgcacccggttcttcagcagaatcaccaaggccaacgtggacctgctgcccagaggcgcccctgagagacagagactgctgcctgctgctctggcctgttggggagtgcggggctctctgctgtctgaagctgatgtgcgggccctgggaggcctggcttgtgatctgcctggaagattcgtggccgagagcgccgaagtgctgctgcctagactggtgtcctgtcccggccctctggaccaggatcagcaggaagctgccagagctgctctgcagggcggaggccctccttatggacctcctagcacttggagcgtgtccaccatggatgccctgaggggcctgctgccagtgctgggccagcctatcatcagatccatcccacagggcatcgtggccgcctggcggcagagaagctctagagatccctcttggcggcagcccgagcggacaatcctgcggcccaggtttcggagagaggtggaaaagaccgcctgcccctctggcaagaaggccagagagatcgacgagagcctgatcttctacaagaagtgggagctggaagcctgcgtggacgccgctctgctggccacccagatggacagagtgaacgccatccccttcacctatgagcagctggacgtgctgaagcacaagctggatgagctgtacccccagggctaccccgagagcgtgatccagcacctgggctacctgtttctgaagatgagccccgaggacatccggaagtggaacgtgaccagcctggaaaccctgaaggccctgctggaagtgaacaagggccacgagatgtccccccaggtggccacactgatcgacagattcgtgaagggcagaggccagctggacaaggacaccctggatacactgaccgccttctaccccggctatctgtgcagcctgtcccccgaggaactgagcagcgtgccacctagctctatctgggctgtgcggccccaggacctggatacctgcgatcctagacagctggatgtgctgtatcccaaggcccggctggccttccagaacatgaacggcagcgagtacttcgtgaagatccagtccttcctgggcggagcccctaccgaggacctgaaagctctgagccagcagaacgtgtccatggatctggccacctttatgaagctgcggaccgacgccgtgctgcctctgacagtggctgaggtgcagaaactgctgggcccccatgtggaagggctgaaggccgaagaacggcacagacccgtgcgcgactggatcctgaggcagagacaggatgacctggacacactgggcctgggactgcaggggggcatccctaatggctacctggtgctggacctgagcatgcaggaagccctgggatccggcgagggcagaggcagcctgctgacatgtggcgacgtggaagagaaccctggccccagcttcctcctgtcgtcgctcagaccgagcctgaccggagcacgcagattggtggaaactatcttccttgggtcacgtccgtggatgccaggtaccccacggcgcctcccgcgcctcccacagagatactggcagatgcggcctctgttcctggaattgctgggaaaccacgctcagtgcccgtacggagtcctgctcaagactcactgccctctgagggcggcggtcactccggcggccggagtgtgcgcacgggagaagccccagggaagcgtggcagctccggaagaggaggacaccgatccgcgccgcctcgtgcaacttctgcgccagcactcctcgccctggcaagtctacgggttcgtccgcgcctgcctgcgccgcctggtgccgcctgggctctggggttcccggcataacgagcgccgcttcctgagaaatactaagaagtttatctcacttggaaaacatgccaagttgtcgctgcaagaactcacgtggaagatgtcagtccgcgattgcgcctggctgcgccgctcgccgggcgtcgggtgtgttccagctgcagaacaccgcctgagagaagaaattctggccaaatttctgcattggctgatgtcagtgtacgtggtcgagctgctgcgctcctttttctacgtcactgagactacctttcaaaagaaccgcctgttcttctaccgcaaatctgtgtggagcaagctgcagtcaatcggcattcgccagcatctgaagagggtgcagctgcgggaactttccgaggcagaagtccgccagcaccgggaggcccggccggcgcttctcacgtcgcgtctgagattcatcccaaagcccgacgggctgaggcctatcgtcaacatggattacgtcgtgggcgctcgcacctttcgccgtgaaaagcgggccgaacgcttgacctcacgggtgaaggccctcttctccgtgctgaactacgagagagcaagacggcctggcctgctgggagcttcggtgctgggactggacgatatccaccgggcttggcggacctttgttctccgggtgagagcccaagaccctccgccggaactgtacttcgtgaaggtggcgatcaccggagcctatgatactattccgcaagatcgactcaccgaagtcatcgcctcgatcatcaaaccgcagaacacttactgcgtcaggcggtacgccgtggtccagaaggccgcgcatggccacgtgagaaaggcgttcaagtcgcacgtgtccactctcaccgacctccagccttacatgaggcaattcgttgcgcatttgcaagagacttcgcccctgagagatgcggtggtcatcgagcagagctccagcctgaacgaagcgagcagcggtctgtttgacgtgttcctccgcttcatgtgtcatcacgcggtgcgaatcaggggaaaatcatacgtgcagtgccagggaatcccacaaggcagcattctgtcgactctcttgtgttccctttgctacggcgatatggaaaacaagctgttcgctgggatcagacgggacgggttgctgctcagactggtggacgacttcctgctggtgactccgcacctcactcacgccaaaacctttctccgcactctggtgaggggagtgccagaatacggctgtgtggtcaatctccggaaaactgtggtgaatttccctgtcgaggatgaggcactcggaggaaccgcatttgtccaaatgccagcacatggcctgttcccatggtgcggtctgctgctggacacccgaactcttgaagtgcagtccgactactccagctatgcccggacgagcatccgcgccagcctcactttcaatcgcggctttaaggccggacgaaacatgcgcagaaagcttttcggagtcctccggcttaaatgccattcgctctttctcgatctccaagtcaattcgctgcagaccgtgtgcacgaacatctacaagatcctgctgctccaagcctaccggttccacgcttgcgtgcttcagctgccgtttcaccaacaggtgtggaagaacccgaccttctttctgcgggtcattagcgatactgcctccctgtgttactcaatcctcaaggcaaagaacgccggaatgtcgctgggtgcgaaaggagccgcgggacctcttcctagcgaagcggtgcagtggctctgccaccaggctttcctcctgaagctgaccaggcacagagtgacctacgtcccgctgctgggctcgctgcgcactgcacagacccagctgtctagaaaactccccggcaccaccctgaccgctctggaagccgccgccaacccagcattgccgtcagatttcaagaccatcttggac

SEQ ID NO: 62 - protein, 1936 aa, Artificial Sequence
  Synthetic Construct
MASTPGTQSPFFLLLLLTVLTVVTGSGHASSTPGGEKETSATQRSSVPSSTEKNAVSMTSSVLSSHSPGSGSSTTQGQDVTLAPATEPASGSAATWGQDVTSVPVTRPALGSTTPPAHDVTSAPDNKPAPGSTAPPAHGVTSAPDTRPAPGSTAPPAHGVTSAPDTRPAPGSTAPPAHGVTSAPDTRPAPGSTAPPAHGVTSAPDTRPAPGSTAPPAHGVTSAPDTRPALGSTAPPVHNVTSASGSASGSASTLVHNGTSARATTTPASKSTPFSIPSHHSDTPTTLASHSTKTDASSTHHSSVPPLTSSNHSTSPQLSTGVSFFFLSFHISNLQFNSSLEDPSTDYYQELQRDISEMFLQIYKQGGFLGLSNIKFRPGSVVVQLTLAFREGTINVHDVETQFNQYKTEAASRYNLTISDVSVSDVPFPFSAQSGAGVPGWGIALLVLVCVLVALAIVYLIALAVCQCRRKNYGQLDIFPARDTYHPMSEYPTYHTHGRYVPPSSTDRSPYEKVSAGNGGSSLSYTNPAVAAASANLGSGRIFNAHYAGYFADLLIHDIETNPGPLAGETGQEAAPLDGVLANPPNISSLSPRQLLGFPCAEVSGLSTERVRELAVALAQKNVKLSTEQLRCLAHRLSEPPEDLDALPLDLLLFLNPDAFSGPQACTRFFSRITKANVDLLPRGAPERQRLLPAALACWGVRGSLLSEADVRALGGLACDLPGRFVAESAEVLLPRLVSCPGPLDQDQQEAARAALQGGGPPYGPPSTWSVSTMDALRGLLPVLGQPIIRSIPQGIVAAWRQRSSRDPSWRQPERTILRPRFRREVEKTACPSGKKAREIDESLIFYKKWELEACVDAALLATQMDRVNAIPFTYEQLDVLKHKLDELYPQGYPESVIQHLGYLFLKMSPEDIRKWNVTSLETLKALLEVNKGHEMSPQVATLIDRFVKGRGQLDKDTLDTLTAFYPGYLCSLSPEELSSVPPSSIWAVRPQDLDTCDPRQLDVLYPKARLAFQNMNGSEYFVKIQSFLGGAPTEDLKALSQQNVSMDLATFMKLRTDAVLPLTVAEVQKLLGPHVEGLKAEERHRPVRDWILRQRQDDLDTLGLGLQGGIPNGYLVLDLSMQEALGSGEGRGSLLTCGDVEENPGPSFLLSSLRPSLTGARRLVETIFLGSRPWMPGTPRRLPRLPQRYWQMRPLFLELLGNHAQCPYGVLLKTHCPLRAAVTPAAGVCAREKPQGSVAAPEEEDTDPRRLVQLLRQHSSPWQVYGFVRACLRRLVPPGLWGSRHNERRFLRNTKKFISLGKHAKLSLQELTWKMSVRDCAWLRRSPGVGCVPAAEHRLREEILAKFLHWLMSVYVVELLRSFFYVTETTFQKNRLFFYRKSVWSKLQSIGIRQHLKRVQLRELSEAEVRQHREARPALLTSRLRFIPKPDGLRPIVNMDYVVGARTFRREKRAERLTSRVKALFSVLNYERARRPGLLGASVLGLDDIHRAWRTFVLRVRAQDPPPELYFVKVAITGAYDTIPQDRLTEVIASIIKPQNTYCVRRYAVVQKAAHGHVRKAFKSHVSTLTDLQPYMRQFVAHLQETSPLRDAVVIEQSSSLNEASSGLFDVFLRFMCHHAVRIRGKSYVQCQGIPQGSILSTLLCSLCYGDMENKLFAGIRRDGLLLRLVDDFLLVTPHLTHAKTFLRTLVRGVPEYGCVVNLRKTVVNFPVEDEALGGTAFVQMPAHGLFPWCGLLLDTRTLEVQSDYSSYARTSIRASLTFNRGFKAGRNMRRKLFGVLRLKCHSLFLDLQVNSLQTVCTNIYKILLLQAYRFHACVLQLPFHQQVWKNPTFFLRVISDTASLCYSILKAKNAGMSLGAKGAAGPLPSEAVQWLCHQAFLLKLTRHRVTYVPLLGSLRTAQTQLSRKLPGTTLTALEAAANPALPSDFKTILD

SEQ ID NO: 63 - DNA, 5829 bp, Artificial Sequence
  Synthetic Construct
atggctagcctggctggcgagacaggacaggaagccgctcctctggacggcgtgctggccaaccctcccaatatcagcagcctgagccccagacagctgctgggattcccttgtgccgaggtgtccggcctgagcacagagagagtgcgggaactggctgtggccctggcccagaaaaacgtgaagctgagcaccgagcagctgcggtgcctggcccacagactgtctgagcctcccgaggatctggacgccctgcctctggatctgctgctgttcctgaaccccgacgccttcagcggacctcaggcctgcacccggttcttcagcagaatcaccaaggccaacgtggacctgctgcccagaggcgcccctgagagacagagactgctgcctgctgctctggcctgttggggagtgcggggctctctgctgtctgaagctgatgtgcgggccctgggaggcctggcttgtgatctgcctggaagattcgtggccgagagcgccgaagtgctgctgcctagactggtgtcctgtcccggccctctggaccaggatcagcaggaagctgccagagctgctctgcagggcggaggccctccttatggacctcctagcacttggagcgtgtccaccatggatgccctgaggggcctgctgccagtgctgggccagcctatcatcagatccatcccacagggcatcgtggccgcctggcggcagagaagctctagagatccctcttggcggcagcccgagcggacaatcctgcggcccaggtttcggagagaggtggaaaagaccgcctgcccctctggcaagaaggccagagagatcgacgagagcctgatcttctacaagaagtgggagctggaagcctgcgtggacgccgctctgctggccacccagatggacagagtgaacgccatccccttcacctatgagcagctggacgtgctgaagcacaagctggatgagctgtacccccagggctaccccgagagcgtgatccagcacctgggctacctgtttctgaagatgagccccgaggacatccggaagtggaacgtgaccagcctggaaaccctgaaggccctgctggaagtgaacaagggccacgagatgtccccccaggtggccacactgatcgacagattcgtgaagggcagaggccagctggacaaggacaccctggatacactgaccgccttctaccccggctatctgtgcagcctgtcccccgaggaactgagcagcgtgccacctagctctatctgggctgtgcggccccaggacctggatacctgcgatcctagacagctggatgtgctgtatcccaaggcccggctggccttccagaacatgaacggcagcgagtacttcgtgaagatccagtccttcctgggcggagcccctaccgaggacctgaaagctctgagccagcagaacgtgtccatggatctggccacctttatgaagctgcggaccgacgccgtgctgcctctgacagtggctgaggtgcagaaactgctgggcccccatgtggaagggctgaaggccgaagaacggcacagacccgtgcgcgactggatcctgaggcagagacaggatgacctggacacactgggcctgggactgcaggggggcatccctaatggctacctggtgctggacctgagcatgcaggaagccctgggatccggcagaatcttcaacgcccactacgccggctacttcgccgacctgctgatccacgacatcgagacaaaccctggccccacccctggaacccagagccccttcttccttctgctgctgctgaccgtgctgactgtcgtgacaggctctggccacgccagctctacacctggcggcgagaaagagacaagcgccacccagagaagcagcgtgccaagcagcaccgagaagaacgccgtgtccatgaccagctccgtgctgagcagccactctcctggcagcggcagcagcacaacacagggccaggatgtgacactggcccctgccacagaacctgcctctggatctgccgccacctggggacaggacgtgacaagcgtgccagtgaccagacctgccctgggctctacaacaccccctgcccacgatgtgaccagcgcccctgataacaagcctgcccctggaagcacagcccctccagctcatggcgtgacctctgccccagataccagaccagccccaggatctacagccccacccgcacacggcgtgacaagtgcccctgacacaagacccgctccaggctctactgctcctcctgcccatggcgtgacaagcgctcccgatacaaggccagctcctggctccacagcaccaccagcacatggcgtgacatcagctcccgacactagacctgctcccggatcaaccgctccaccagctcacggcgtgaccagcgcacctgataccagacctgctctgggaagcaccgcccctcccgtgcacaatgtgacatctgcttccggcagcgccagcggctctgcctctacactggtgcacaacggcaccagcgccagagccacaacaaccccagccagcaagagcacccccttcagcatccctagccaccacagcgacacccctaccacactggccagccactccaccaagaccgatgcctctagcacccaccactccagcgtgccccctctgaccagcagcaaccacagcacaagcccccagctgtctaccggcgtctcattcttctttctgtccttccacatcagcaacctgcagttcaacagcagcctggaagatcccagcaccgactactaccaggaactgcagcgggatatcagcgagatgttcctgcaaatctacaagcagggcggcttcctgggcctgagcaacatcaagttcagacccggcagcgtggtggtgcagctgaccctggctttccgggaaggcaccatcaacgtgcacgacgtggaaacccagttcaaccagtacaagaccgaggccgccagccggtacaacctgaccatctccgatgtgtccgtgtccgacgtgcccttcccattctctgcccagtctggcgcaggcgtgccaggatggggaattgctctgctggtgctcgtgtgcgtgctggtggccctggccatcgtgtatctgattgccctggccgtgtgccagtgccggcggaagaattacggccagctggacatcttccccgccagagacacctaccaccccatgagcgagtaccccacataccacacccacggcagatacgtgccacccagctccaccgacagatccccctacgagaaagtgtctgccggcaacggcggcagctccctgagctacacaaatcctgccgtggccgctgcctccgccaacctgggatccggcacaatcctgtctgagggcgccaccaacttcagcctgctgaaactggccggcgacgtggaactgaaccctggccctagcttcctcctgtcgtcgctcagaccgagcctgaccggagcacgcagattggtggaaactatcttccttgggtcacgtccgtggatgccaggtaccccacggcgcctcccgcgcctcccacagagatactggcagatgcggcctctgttcctggaattgctgggaaaccacgctcagtgcccgtacggagtcctgctcaagactcactgccctctgagggcggcggtcactccggcggccggagtgtgcgcacgggagaagccccagggaagcgtggcagctccggaagaggaggacaccgatccgcgccgcctcgtgcaacttctgcgccagcactcctcgccctggcaagtctacgggttcgtccgcgcctgcctgcgccgcctggtgccgcctgggctctggggttcccggcataacgagcgccgcttcctgagaaatactaagaagtttatctcacttggaaaacatgccaagttgtcgctgcaagaactcacgtggaagatgtcagtccgcgattgcgcctggctgcgccgctcgccgggcgtcgggtgtgttccagctgcagaacaccgcctgagagaagaaattctggccaaatttctgcattggctgatgtcagtgtacgtggtcgagctgctgcgctcctttttctacgtcactgagactacctttcaaaagaaccgcctgttcttctaccgcaaatctgtgtggagcaagctgcagtcaatcggcattcgccagcatctgaagagggtgcagctgcgggaactttccgaggcagaagtccgccagcaccgggaggcccggccggcgcttctcacgtcgcgtctgagattcatcccaaagcccgacgggctgaggcctatcgtcaacatggattacgtcgtgggcgctcgcacctttcgccgtgaaaagcgggccgaacgcttgacctcacgggtgaaggccctcttctccgtgctgaactacgagagagcaagacggcctggcctgctgggagcttcggtgctgggactggacgatatccaccgggcttggcggacctttgttctccgggtgagagcccaagaccctccgccggaactgtacttcgtgaaggtggcgatcaccggagcctatgatactattccgcaagatcgactcaccgaagtcatcgcctcgatcatcaaaccgcagaacacttactgcgtcaggcggtacgccgtggtccagaaggccgcgcatggccacgtgagaaaggcgttcaagtcgcacgtgtccactctcaccgacctccagccttacatgaggcaattcgttgcgcatttgcaagagacttcgcccctgagagatgcggtggtcatcgagcagagctccagcctgaacgaagcgagcagcggtctgtttgacgtgttcctccgcttcatgtgtcatcacgcggtgcgaatcaggggaaaatcatacgtgcagtgccagggaatcccacaaggcagcattctgtcgactctcttgtgttccctttgctacggcgatatggaaaacaagctgttcgctgggatcagacgggacgggttgctgctcagactggtggacgacttcctgctggtgactccgcacctcactcacgccaaaacctttctccgcactctggtgaggggagtgccagaatacggctgtgtggtcaatctccggaaaactgtggtgaatttccctgtcgaggatgaggcactcggaggaaccgcatttgtccaaatgccagcacatggcctgttcccatggtgcggtctgctgctggacacccgaactcttgaagtgcagtccgactactccagctatgcccggacgagcatccgcgccagcctcactttcaatcgcggctttaaggccggacgaaacatgcgcagaaagcttttcggagtcctccggcttaaatgccattcgctctttctcgatctccaagtcaattcgctgcagaccgtgtgcacgaacatctacaagatcctgctgctccaagcctaccggttccacgcttgcgtgcttcagctgccgtttcaccaacaggtgtggaagaacccgaccttctttctgcgggtcattagcgatactgcctccctgtgttactcaatcctcaaggcaaagaacgccggaatgtcgctgggtgcgaaaggagccgcgggacctcttcctagcgaagcggtgcagtggctctgccaccaggctttcctcctgaagctgaccaggcacagagtgacctacgtcccgctgctgggctcgctgcgcactgcacagacccagctgtctagaaaactccccggcaccaccctgaccgctctggaagccgccgccaacccagcattgccgtcagatttcaagaccatcttggac

SEQ ID NO: 64 - protein, 1943 aa, Artificial Sequence
  Synthetic Construct
MASLAGETGQEAAPLDGVLANPPNISSLSPRQLLGFPCAEVSGLSTERVRELAVALAQKNVKLSTEQLRCLAHRLSEPPEDLDALPLDLLLFLNPDAFSGPQACTRFFSRITKANVDLLPRGAPERQRLLPAALACWGVRGSLLSEADVRALGGLACDLPGRFVAESAEVLLPRLVSCPGPLDQDQQEAARAALQGGGPPYGPPSTWSVSTMDALRGLLPVLGQPIIRSIPQGIVAAWRQRSSRDPSWRQPERTILRPRFRREVEKTACPSGKKAREIDESLIFYKKWELEACVDAALLATQMDRVNAIPFTYEQLDVLKHKLDELYPQGYPESVIQHLGYLFLKMSPEDIRKWNVTSLETLKALLEVNKGHEMSPQVATLIDRFVKGRGQLDKDTLDTLTAFYPGYLCSLSPEELSSVPPSSIWAVRPQDLDTCDPRQLDVLYPKARLAFQNMNGSEYFVKIQSFLGGAPTEDLKALSQQNVSMDLATFMKLRTDAVLPLTVAEVQKLLGPHVEGLKAEERHRPVRDWILRQRQDDLDTLGLGLQGGIPNGYLVLDLSMQEALGSGRIFNAHYAGYFADLLIHDIETNPGPTPGTQSPFFLLLLLTVLTVVTGSGHASSTPGGEKETSATQRSSVPSSTEKNAVSMTSSVLSSHSPGSGSSTTQGQDVTLAPATEPASGSAATWGQDVTSVPVTRPALGSTTPPAHDVTSAPDNKPAPGSTAPPAHGVTSAPDTRPAPGSTAPPAHGVTSAPDTRPAPGSTAPPAHGVTSAPDTRPAPGSTAPPAHGVTSAPDTRPAPGSTAPPAHGVTSAPDTRPALGSTAPPVHNVTSASGSASGSASTLVHNGTSARATTTPASKSTPFSIPSHHSDTPTTLASHSTKTDASSTHHSSVPPLTSSNHSTSPQLSTGVSFFFLSFHISNLQFNSSLEDPSTDYYQELQRDISEMFLQIYKQGGFLGLSNIKFRPGSVVVQLTLAFREGTINVHDVETQFNQYKTEAASRYNLTISDVSVSDVPFPFSAQSGAGVPGWGIALLVLVCVLVALAIVYLIALAVCQCRRKNYGQLDIFPARDTYHPMSEYPTYHTHGRYVPPSSTDRSPYEKVSAGNGGSSLSYTNPAVAAASANLGSGTILSEGATNFSLLKLAGDVELNPGPSFLLSSLRPSLTGARRLVETIFLGSRPWMPGTPRRLPRLPQRYWQMRPLFLELLGNHAQCPYGVLLKTHCPLRAAVTPAAGVCAREKPQGSVAAPEEEDTDPRRLVQLLRQHSSPWQVYGFVRACLRRLVPPGLWGSRHNERRFLRNTKKFISLGKHAKLSLQELTWKMSVRDCAWLRRSPGVGCVPAAEHRLREEILAKFLHWLMSVYVVELLRSFFYVTETTFQKNRLFFYRKSVWSKLQSIGIRQHLKRVQLRELSEAEVRQHREARPALLTSRLRFIPKPDGLRPIVNMDYVVGARTFRREKRAERLTSRVKALFSVLNYERARRPGLLGASVLGLDDIHRAWRTFVLRVRAQDPPPELYFVKVAITGAYDTIPQDRLTEVIASIIKPQNTYCVRRYAVVQKAAHGHVRKAFKSHVSTLTDLQPYMRQFVAHLQETSPLRDAVVIEQSSSLNEASSGLFDVFLRFMCHHAVRIRGKSYVQCQGIPQGSILSTLLCSLCYGDMENKLFAGIRRDGLLLRLVDDFLLVTPHLTHAKTFLRTLVRGVPEYGCVVNLRKTVVNFPVEDEALGGTAFVQMPAHGLFPWCGLLLDTRTLEVQSDYSSYARTSIRASLTFNRGFKAGRNMRRKLFGVLRLKCHSLFLDLQVNSLQTVCTNIYKILLLQAYRFHACVLQLPFHQQVWKNPTFFLRVISDTASLCYSILKAKNAGMSLGAKGAAGPLPSEAVQWLCHQAFLLKLTRHRVTYVPLLGSLRTAQTQLSRKLPGTTLTALEAAANPALPSDFKTILD

SEQ ID NO: 65 - DNA, 5808 bp, Artificial Sequence
  Synthetic Construct
atggctagcctggctggcgagacaggacaggaagccgctcctctggacggcgtgctggccaaccctcccaatatcagcagcctgagccccagacagctgctgggattcccttgtgccgaggtgtccggcctgagcacagagagagtgcgggaactggctgtggccctggcccagaaaaacgtgaagctgagcaccgagcagctgcggtgcctggcccacagactgtctgagcctcccgaggatctggacgccctgcctctggatctgctgctgttcctgaaccccgacgccttcagcggacctcaggcctgcacccggttcttcagcagaatcaccaaggccaacgtggacctgctgcccagaggcgcccctgagagacagagactgctgcctgctgctctggcctgttggggagtgcggggctctctgctgtctgaagctgatgtgcgggccctgggaggcctggcttgtgatctgcctggaagattcgtggccgagagcgccgaagtgctgctgcctagactggtgtcctgtcccggccctctggaccaggatcagcaggaagctgccagagctgctctgcagggcggaggccctccttatggacctcctagcacttggagcgtgtccaccatggatgccctgaggggcctgctgccagtgctgggccagcctatcatcagatccatcccacagggcatcgtggccgcctggcggcagagaagctctagagatccctcttggcggcagcccgagcggacaatcctgcggcccaggtttcggagagaggtggaaaagaccgcctgcccctctggcaagaaggccagagagatcgacgagagcctgatcttctacaagaagtgggagctggaagcctgcgtggacgccgctctgctggccacccagatggacagagtgaacgccatccccttcacctatgagcagctggacgtgctgaagcacaagctggatgagctgtacccccagggctaccccgagagcgtgatccagcacctgggctacctgtttctgaagatgagccccgaggacatccggaagtggaacgtgaccagcctggaaaccctgaaggccctgctggaagtgaacaagggccacgagatgtccccccaggtggccacactgatcgacagattcgtgaagggcagaggccagctggacaaggacaccctggatacactgaccgccttctaccccggctatctgtgcagcctgtcccccgaggaactgagcagcgtgccacctagctctatctgggctgtgcggccccaggacctggatacctgcgatcctagacagctggatgtgctgtatcccaaggcccggctggccttccagaacatgaacggcagcgagtacttcgtgaagatccagtccttcctgggcggagcccctaccgaggacctgaaagctctgagccagcagaacgtgtccatggatctggccacctttatgaagctgcggaccgacgccgtgctgcctctgacagtggctgaggtgcagaaactgctgggcccccatgtggaagggctgaaggccgaagaacggcacagacccgtgcgcgactggatcctgaggcagagacaggatgacctggacacactgggcctgggactgcaggggggcatccctaatggctacctggtgctggacctgagcatgcaggaagccctgggatccggcgagggcagaggcagcctgctgacatgtggcgacgtggaagagaaccctggccccagcttcctcctgtcgtcgctcagaccgagcctgaccggagcacgcagattggtggaaactatcttccttgggtcacgtccgtggatgccaggtaccccacggcgcctcccgcgcctcccacagagatactggcagatgcggcctctgttcctggaattgctgggaaaccacgctcagtgcccgtacggagtcctgctcaagactcactgccctctgagggcggcggtcactccggcggccggagtgtgcgcacgggagaagccccagggaagcgtggcagctccggaagaggaggacaccgatccgcgccgcctcgtgcaacttctgcgccagcactcctcgccctggcaagtctacgggttcgtccgcgcctgcctgcgccgcctggtgccgcctgggctctggggttcccggcataacgagcgccgcttcctgagaaatactaagaagtttatctcacttggaaaacatgccaagttgtcgctgcaagaactcacgtggaagatgtcagtccgcgattgcgcctggctgcgccgctcgccgggcgtcgggtgtgttccagctgcagaacaccgcctgagagaagaaattctggccaaatttctgcattggctgatgtcagtgtacgtggtcgagctgctgcgctcctttttctacgtcactgagactacctttcaaaagaaccgcctgttcttctaccgcaaatctgtgtggagcaagctgcagtcaatcggcattcgccagcatctgaagagggtgcagctgcgggaactttccgaggcagaagtccgccagcaccgggaggcccggccggcgcttctcacgtcgcgtctgagattcatcccaaagcccgacgggctgaggcctatcgtcaacatggattacgtcgtgggcgctcgcacctttcgccgtgaaaagcgggccgaacgcttgacctcacgggtgaaggccctcttctccgtgctgaactacgagagagcaagacggcctggcctgctgggagcttcggtgctgggactggacgatatccaccgggcttggcggacctttgttctccgggtgagagcccaagaccctccgccggaactgtacttcgtgaaggtggcgatcaccggagcctatgatactattccgcaagatcgactcaccgaagtcatcgcctcgatcatcaaaccgcagaacacttactgcgtcaggcggtacgccgtggtccagaaggccgcgcatggccacgtgagaaaggcgttcaagtcgcacgtgtccactctcaccgacctccagccttacatgaggcaattcgttgcgcatttgcaagagacttcgcccctgagagatgcggtggtcatcgagcagagctccagcctgaacgaagcgagcagcggtctgtttgacgtgttcctccgcttcatgtgtcatcacgcggtgcgaatcaggggaaaatcatacgtgcagtgccagggaatcccacaaggcagcattctgtcgactctcttgtgttccctttgctacggcgatatggaaaacaagctgttcgctgggatcagacgggacgggttgctgctcagactggtggacgacttcctgctggtgactccgcacctcactcacgccaaaacctttctccgcactctggtgaggggagtgccagaatacggctgtgtggtcaatctccggaaaactgtggtgaatttccctgtcgaggatgaggcactcggaggaaccgcatttgtccaaatgccagcacatggcctgttcccatggtgcggtctgctgctggacacccgaactcttgaagtgcagtccgactactccagctatgcccggacgagcatccgcgccagcctcactttcaatcgcggctttaaggccggacgaaacatgcgcagaaagcttttcggagtcctccggcttaaatgccattcgctctttctcgatctccaagtcaattcgctgcagaccgtgtgcacgaacatctacaagatcctgctgctccaagcctaccggttccacgcttgcgtgcttcagctgccgtttcaccaacaggtgtggaagaacccgaccttctttctgcgggtcattagcgatactgcctccctgtgttactcaatcctcaaggcaaagaacgccggaatgtcgctgggtgcgaaaggagccgcgggacctcttcctagcgaagcggtgcagtggctctgccaccaggctttcctcctgaagctgaccaggcacagagtgacctacgtcccgctgctgggctcgctgcgcactgcacagacccagctgtctagaaaactccccggcaccaccctgaccgctctggaagccgccgccaacccagcattgccgtcagatttcaagaccatcttggacggatccggcacaatcctgtctgagggcgccaccaacttcagcctgctgaaactggccggcgacgtggaactgaaccctggccctacccctggaacccagagccccttcttccttctgctgctgctgaccgtgctgactgtcgtgacaggctctggccacgccagctctacacctggcggcgagaaagagacaagcgccacccagagaagcagcgtgccaagcagcaccgagaagaacgccgtgtccatgaccagctccgtgctgagcagccactctcctggcagcggcagcagcacaacacagggccaggatgtgacactggcccctgccacagaacctgcctctggatctgccgccacctggggacaggacgtgacaagcgtgccagtgaccagacctgccctgggctctacaacaccccctgcccacgatgtgaccagcgcccctgataacaagcctgcccctggaagcacagcccctccagctcatggcgtgacctctgccccagataccagaccagccccaggatctacagccccacccgcacacggcgtgacaagtgcccctgacacaagacccgctccaggctctactgctcctcctgcccatggcgtgacaagcgctcccgatacaaggccagctcctggctccacagcaccaccagcacatggcgtgacatcagctcccgacactagacctgctcccggatcaaccgctccaccagctcacggcgtgaccagcgcacctgataccagacctgctctgggaagcaccgcccctcccgtgcacaatgtgacatctgcttccggcagcgccagcggctctgcctctacactggtgcacaacggcaccagcgccagagccacaacaaccccagccagcaagagcacccccttcagcatccctagccaccacagcgacacccctaccacactggccagccactccaccaagaccgatgcctctagcacccaccactccagcgtgccccctctgaccagcagcaaccacagcacaagcccccagctgtctaccggcgtctcattcttctttctgtccttccacatcagcaacctgcagttcaacagcagcctggaagatcccagcaccgactactaccaggaactgcagcgggatatcagcgagatgttcctgcaaatctacaagcagggcggcttcctgggcctgagcaacatcaagttcagacccggcagcgtggtggtgcagctgaccctggctttccgggaaggcaccatcaacgtgcacgacgtggaaacccagttcaaccagtacaagaccgaggccgccagccggtacaacctgaccatctccgatgtgtccgtgtccgacgtgcccttcccattctctgcccagtctggcgcaggcgtgccaggatggggaattgctctgctggtgctcgtgtgcgtgctggtggccctggccatcgtgtatctgattgccctggccgtgtgccagtgccggcggaagaattacggccagctggacatcttccccgccagagacacctaccaccccatgagcgagtaccccacataccacacccacggcagatacgtgccacccagctccaccgacagatccccctacgagaaagtgtctgccggcaacggcggcagctccctgagctacacaaatcctgccgtggccgctgcctccgccaacctg

SEQ ID NO: 66 - protein, 1936 aa, Artificial Sequence
  Synthetic Construct
MASLAGETGQEAAPLDGVLANPPNISSLSPRQLLGFPCAEVSGLSTERVRELAVALAQKNVKLSTEQLRCLAHRLSEPPEDLDALPLDLLLFLNPDAFSGPQACTRFFSRITKANVDLLPRGAPERQRLLPAALACWGVRGSLLSEADVRALGGLACDLPGRFVAESAEVLLPRLVSCPGPLDQDQQEAARAALQGGGPPYGPPSTWSVSTMDALRGLLPVLGQPIIRSIPQGIVAAWRQRSSRDPSWRQPERTILRPRFRREVEKTACPSGKKAREIDESLIFYKKWELEACVDAALLATQMDRVNAIPFTYEQLDVLKHKLDELYPQGYPESVIQHLGYLFLKMSPEDIRKWNVTSLETLKALLEVNKGHEMSPQVATLIDRFVKGRGQLDKDTLDTLTAFYPGYLCSLSPEELSSVPPSSIWAVRPQDLDTCDPRQLDVLYPKARLAFQNMNGSEYFVKIQSFLGGAPTEDLKALSQQNVSMDLATFMKLRTDAVLPLTVAEVQKLLGPHVEGLKAEERHRPVRDWILRQRQDDLDTLGLGLQGGIPNGYLVLDLSMQEALGSGEGRGSLLTCGDVEENPGPSFLLSSLRPSLTGARRLVETIFLGSRPWMPGTPRRLPRLPQRYWQMRPLFLELLGNHAQCPYGVLLKTHCPLRAAVTPAAGVCAREKPQGSVAAPEEEDTDPRRLVQLLRQHSSPWQVYGFVRACLRRLVPPGLWGSRHNERRFLRNTKKFISLGKHAKLSLQELTWKMSVRDCAWLRRSPGVGCVPAAEHRLREEILAKFLHWLMSVYVVELLRSFFYVTETTFQKNRLFFYRKSVWSKLQSIGIRQHLKRVQLRELSEAEVRQHREARPALLTSRLRFIPKPDGLRPIVNMDYVVGARTFRREKRAERLTSRVKALFSVLNYERARRPGLLGASVLGLDDIHRAWRTFVLRVRAQDPPPELYFVKVAITGAYDTIPQDRLTEVIASIIKPQNTYCVRRYAVVQKAAHGHVRKAFKSHVSTLTDLQPYMRQFVAHLQETSPLRDAVVIEQSSSLNEASSGLFDVFLRFMCHHAVRIRGKSYVQCQGIPQGSILSTLLCSLCYGDMENKLFAGIRRDGLLLRLVDDFLLVTPHLTHAKTFLRTLVRGVPEYGCVVNLRKTVVNFPVEDEALGGTAFVQMPAHGLFPWCGLLLDTRTLEVQSDYSSYARTSIRASLTFNRGFKAGRNMRRKLFGVLRLKCHSLFLDLQVNSLQTVCTNIYKILLLQAYRFHACVLQLPFHQQVWKNPTFFLRVISDTASLCYSILKAKNAGMSLGAKGAAGPLPSEAVQWLCHQAFLLKLTRHRVTYVPLLGSLRTAQTQLSRKLPGTTLTALEAAANPALPSDFKTILDGSGTILSEGATNFSLLKLAGDVELNPGPTPGTQSPFFLLLLLTVLTVVTGSGHASSTPGGEKETSATQRSSVPSSTEKNAVSMTSSVLSSHSPGSGSSTTQGQDVTLAPATEPASGSAATWGQDVTSVPVTRPALGSTTPPAHDVTSAPDNKPAPGSTAPPAHGVTSAPDTRPAPGSTAPPAHGVTSAPDTRPAPGSTAPPAHGVTSAPDTRPAPGSTAPPAHGVTSAPDTRPAPGSTAPPAHGVTSAPDTRPALGSTAPPVHNVTSASGSASGSASTLVHNGTSARATTTPASKSTPFSIPSHHSDTPTTLASHSTKTDASSTHHSSVPPLTSSNHSTSPQLSTGVSFFFLSFHISNLQFNSSLEDPSTDYYQELQRDISEMFLQIYKQGGFLGLSNIKFRPGSVVVQLTLAFREGTINVHDVETQFNQYKTEAASRYNLTISDVSVSDVPFPFSAQSGAGVPGWGIALLVLVCVLVALAIVYLIALAVCQCRRKNYGQLDIFPARDTYHPMSEYPTYHTHGRYVPPSSTDRSPYEKVSAGNGGSSLSYTNPAVAAASANL

SEQ ID NO: 67 - DNA, 84 bp, Artificial Sequence
  Synthetic Construct
ggatccggcagaatcttcaacgcccactacgccggctacttcgccgacctgctgatccacgacatcgagacaaaccctggcccc

SEQ ID NO: 68 - protein, 28 aa, Artificial Sequence
  Synthetic Construct
GSGRIFNAHYAGYFADLLIHDIETNPGP

SEQ ID NO: 69 - DNA, 63 bp, Artificial Sequence
  Synthetic Construct
ggatccggcgagggcagaggcagcctgctgacatgtggcgacgtggaagagaaccctggcccc

SEQ ID NO: 70 - protein, 21 aa, Artificial Sequence
  Synthetic Construct
GSGEGRGSLLTCGDVEENPGP

SEQ ID NO: 71 - DNA, 84 bp, Artificial Sequence
  Synthetic Construct
ggatccggcacaatcctgtctgagggcgccaccaacttcagcctgctgaaactggccggcgacgtggaactgaaccctggccct

SEQ ID NO: 72 - protein, 28 aa, Artificial Sequence
  Synthetic Construct
GSGTILSEGATNFSLLKLAGDVELNPGP

SEQ ID NO: 73 - DNA, 66 bp, Artificial Sequence
  Synthetic Construct
ggatccggcgccaccaatttcagcctgctgaaacaggccggcgacgtggaagagaaccctggccct

SEQ ID NO: 74 - protein, 22 aa, Artificial Sequence
  Synthetic Construct
GSGATNFSLLKQAGDVEENPGP

SEQ ID NO: 75 - DNA, 43 bp, Artificial Sequence
  Synthetic Construct
gagacaaaccctggccccctggctggcgagacaggacaggaag

SEQ ID NO: 76 - DNA, 46 bp, Artificial Sequence
  Synthetic Construct
gttgaagattctgccggatcccaggttggcggaggcagcggccacg

SEQ ID NO: 77 - DNA, 47 bp, Artificial Sequence
  Synthetic Construct
gctacttcgccgacctgctgatccacgacatcgagacaaaccctggc

SEQ ID NO: 78 - DNA, 47 bp, Artificial Sequence
  Synthetic Construct
ggtcggcgaagtagccggcgtagtgggcgttgaagattctgccggat

SEQ ID NO: 79 - DNA, 24 bp, Artificial Sequence
  Synthetic Construct
ttctgaagatgagccccgaggaca

SEQ ID NO: 80 - DNA, 24 bp, Artificial Sequence
  Synthetic Construct
cggcgtctcattcttctttctgtc

SEQ ID NO: 81 - DNA, 46 bp, Artificial Sequence
  Synthetic Construct
accctgtgacgaacatggctagcctggctggcgagacaggacagga

SEQ ID NO: 82 - DNA, 43 bp, Artificial Sequence
  Synthetic Construct
accctgtgacgaacatggctagcacaggctctggccacgccag

SEQ ID NO: 83 - DNA, 42 bp, Artificial Sequence
  Synthetic Construct
accctgtgacgaacatggctagcacccctggaacccagagcc

SEQ ID NO: 84 - DNA, 42 bp, Artificial Sequence
  Synthetic Construct
accctgtgacgaacatggctagcggagctgccccggagccgg

SEQ ID NO: 85 - DNA, 24 bp, Artificial Sequence
  Synthetic Construct
tctcaccgacctccagccttacat

SEQ ID NO: 86 - DNA, 37 bp, Artificial Sequence
  Synthetic Construct
acggaggctccggcggactggctggcgagacaggaca

SEQ ID NO: 87 - DNA, 36 bp, Artificial Sequence
  Synthetic Construct
tgggaggctccggcggaggagctgccccggagccgg

SEQ ID NO: 88 - DNA, 56 bp, Artificial Sequence
  Synthetic Construct
cctgctgatccacgacatcgagacaaaccctggccccacccctggaacccagagcc

SEQ ID NO: 89 - DNA, 52 bp, Artificial Sequence
  Synthetic Construct
tggccggcgacgtggaactgaaccctggccctacaggctctggccacgccag

SEQ ID NO: 90 - DNA, 51 bp, Artificial Sequence
  Synthetic Construct
tggccggcgacgtggaactgaaccctggccctacccctggaacccagagcc

SEQ ID NO: 91 - DNA, 54 bp, Artificial Sequence
  Synthetic Construct
tggccggcgacgtggaactgaaccctggccctagcttcctcctgtcgtcgctca

SEQ ID NO: 92 - DNA, 51 bp, Artificial Sequence
  Synthetic Construct
tggccggcgacgtggaactgaaccctggccctggagctgccccggagccgg

SEQ ID NO: 93 - DNA, 56 bp, Artificial Sequence
  Synthetic Construct
tggccggcgacgtggaactgaaccctggccctgccaaatttctgcattggctgatg

SEQ ID NO: 94 - DNA, 43 bp, Artificial Sequence
  Synthetic Construct
tggaagagaaccctggccctctggctggcgagacaggacagga

SEQ ID NO: 95 - DNA, 39 bp, Artificial Sequence
  Synthetic Construct
tggaagagaaccctggccctacccctggaacccagagcc

SEQ ID NO: 96 - DNA, 49 bp, Artificial Sequence
  Synthetic Construct
gcgacgtggaagagaaccctggccccctggctggcgagacaggacagga

SEQ ID NO: 97 - DNA, 48 bp, Artificial Sequence
  Synthetic Construct
gcgacgtggaagagaaccctggccccagcttcctcctgtcgtcgctca

SEQ ID NO: 98 - DNA, 50 bp, Artificial Sequence
  Synthetic Construct
gcgacgtggaagagaaccctggccccgccaaatttctgcattggctgatg

SEQ ID NO: 99 - DNA, 45 bp, Artificial Sequence
  Synthetic Construct
gcgacgtggaagagaaccctggccccggagctgccccggagccgg

SEQ ID NO: 100 - DNA, 59 bp, Artificial Sequence
  Synthetic Construct
agaatcttcaacgcccactacgccggctacttcgccgacctgctgatccacgacatcga

SEQ ID NO: 101 - DNA, 56 bp, Artificial Sequence
  Synthetic Construct
tgtctgagggcgccaccaacttcagcctgctgaaactggccggcgacgtggaactg

SEQ ID NO: 102 - DNA, 48 bp, Artificial Sequence
  Synthetic Construct
ttcagcctgctgaaacaggccggcgacgtggaagagaaccctggccct

SEQ ID NO: 103 - DNA, 54 bp, Artificial Sequence
  Synthetic Construct
ccggcgagggcagaggcagcctgctgacatgtggcgacgtggaagagaaccctg

SEQ ID NO: 104 - DNA, 45 bp, Artificial Sequence
  Synthetic Construct
gggcccagatcttcacagggcttcctgcatgctcaggtccagcac

SEQ ID NO: 105 - DNA, 39 bp, Artificial Sequence
  Synthetic Construct
acgaacatggctagcacccctggaacccagagccccttc

SEQ ID NO: 106 - DNA, 50 bp, Artificial Sequence
  Synthetic Construct
gtgggcgttgaagattctgccggatcccagggcttcctgcatgctcaggt

SEQ ID NO: 107 - DNA, 53 bp, Artificial Sequence
  Synthetic Construct
tggtggcgccctcagacaggattgtgccggatcccaggttggcggaggcagcg

SEQ ID NO: 108 - DNA, 58 bp, Artificial Sequence
  Synthetic Construct
tggtggcgccctcagacaggattgtgccggatccgtccaagatggtcttgaaatctga

SEQ ID NO: 109 - DNA, 38 bp, Artificial Sequence
  Synthetic Construct
tccgccggagcctcccagggcttcctgcatgctcaggt

SEQ ID NO: 110 - DNA, 34 bp, Artificial Sequence
  Synthetic Construct
tccgccggagcctcccaggttggcggaggcagcg

SEQ ID NO: 111 - DNA, 39 bp, Artificial Sequence
  Synthetic Construct
tccgccggagcctccgtccaagatggtcttgaaatctga

SEQ ID NO: 112 - DNA, 19 bp, Artificial Sequence
  Synthetic Construct
tgtcctcggggctcatctt

SEQ ID NO: 113 - DNA, 24 bp, Artificial Sequence
  Synthetic Construct
aaggacagaaagaagaatgagacg

SEQ ID NO: 114 - DNA, 48 bp, Artificial Sequence
  Synthetic Construct
ttgttttgttagggcccagatcttcacagggcttcctgcatgctcagg

SEQ ID NO: 115 - DNA, 45 bp, Artificial Sequence
  Synthetic Construct
ttgttttgttagggcccagatcttcacaggttggcggaggcagcg

SEQ ID NO: 116 - DNA, 50 bp, Artificial Sequence
  Synthetic Construct
ttgttttgttagggcccagatcttcagtccaagatggtcttgaaatctga

SEQ ID NO: 117 - DNA, 59 bp, Artificial Sequence
  Synthetic Construct
ctgtttcagcaggctgaaattggtggcgccggatcccagggcttcctgcatgctcaggt

SEQ ID NO: 118 - DNA, 55 bp, Artificial Sequence
  Synthetic Construct
ctgtttcagcaggctgaaattggtggcgccggatcccaggttggcggaggcagcg

SEQ ID NO: 119 - DNA, 45 bp, Artificial Sequence
  Synthetic Construct
tgcctctgccctcgccggatcccagggcttcctgcatgctcaggt

SEQ ID NO: 120 - DNA, 46 bp, Artificial Sequence
  Synthetic Construct
tgcctctgccctcgccggatccgtccaagatggtcttgaaatctga

SEQ ID NO: 121 - DNA, 24 bp, Artificial Sequence
  Synthetic Construct
aggctggaggtcggtgagagtgga

SEQ ID NO: 122 - DNA, 57 bp, Artificial Sequence
  Synthetic Construct
agggttctcttccacgtcgccacatgtcagcaggctgcctctgccctcgccggatcc

SEQ ID NO: 123 - DNA, 41 bp, Artificial Sequence
  Synthetic Construct
acgaacatggctagcttcctcctgtcgtcgctcagaccgag

SEQ ID NO: 124 - DNA, 47 bp, Artificial Sequence
  Synthetic Construct
ttgttttgttagggcccagatcttcagtccaagatggtcttgaaatc

SEQ ID NO: 125 - DNA, 41 bp, Artificial Sequence
  Synthetic Construct
acgaacatggctagcgccaaatttctgcattggctgatgtc

SEQ ID NO: 126 - DNA, 47 bp, Artificial Sequence; identical to SEQ ID NO: 124
  Synthetic Construct

SEQ ID NO: 127 - DNA, 39 bp, Artificial Sequence
  Synthetic Construct
accctgtgacgaacatgggagctgccccggagccggaga

SEQ ID NO: 128 - DNA, 32 bp, Artificial Sequence
  Synthetic Construct
caacaagctagcctggctggcgagacaggaca

SEQ ID NO: 129 - DNA, 36 bp, Artificial Sequence
  Synthetic Construct
caacaaagatctttacagggcttcctgcatgcacag

SEQ ID NO: 130 - DNA, 23 bp, Artificial Sequence
  Synthetic Construct
accctgtgacgaacatggctagc

SEQ ID NO: 131 - DNA, 17 bp, Artificial Sequence
  Synthetic Construct
agatctgggccctaaca

SEQ ID NO: 132 - protein, 15 aa, Artificial Sequence
  Synthetic Construct
MASTPGTQSPFFLLL

SEQ ID NO: 133 - protein, 15 aa, Artificial Sequence
  Synthetic Construct
TPGTQSPFFLLLLLT

SEQ ID NO: 134 - protein, 15 aa, Artificial Sequence
  Synthetic Construct
TQSPFFLLLLLTVLT

SEQ ID NO: 135 - protein, 15 aa, Artificial Sequence
  Synthetic Construct
FFLLLLLTVLTVVTG

SEQ ID NO: 136 - protein, 15 aa, Artificial Sequence
  Synthetic Construct
LLLTVLTVVTGSGHA

SEQ ID NO: 137 - protein, 15 aa, Artificial Sequence
  Synthetic Construct
VLTVVTGSGHASSTP

SEQ ID NO: 138 - protein, 15 aa, Artificial Sequence
  Synthetic Construct
VTGSGHASSTPGGEK

SEQ ID NO: 139 - protein, 15 aa, Artificial Sequence
  Synthetic Construct
GHASSTPGGEKETSA

SEQ ID NO: 140 - protein, 15 aa, Artificial Sequence
  Synthetic Construct
STPGGEKETSATQRS

SEQ ID NO: 141 - protein, 15 aa, Artificial Sequence
  Synthetic Construct
GEKETSATQRSSVPS

SEQ ID NO: 142 - protein, 15 aa, Artificial Sequence
  Synthetic Construct
TSATQRSSVPSSTEK

SEQ ID NO: 143 - protein, 15 aa, Artificial Sequence
  Synthetic Construct
QRSSVPSSTEKNAVS

SEQ ID NO: 144 - protein, 15 aa, Artificial Sequence
  Synthetic Construct
VPSSTEKNAVSMTSS

SEQ ID NO: 145 - protein, 15 aa, Artificial Sequence
  Synthetic Construct
TEKNAVSMTSSVLSS

SEQ ID NO: 146 - protein, 15 aa, Artificial Sequence
  Synthetic Construct
AVSMTSSVLSSHSPG

SEQ ID NO: 147 - protein, 15 aa, Artificial Sequence
  Synthetic Construct
TSSVLSSHSPGSGSS

SEQ ID NO: 148 - protein, 15 aa, Artificial Sequence
  Synthetic Construct
LSSHSPGSGSSTTQG

SEQ ID NO: 149 - protein, 15 aa, Artificial Sequence
  Synthetic Construct
SPGSGSSTTQGQDVT

SEQ ID NO: 150 - protein, 15 aa, Artificial Sequence
  Synthetic Construct
GSSTTQGQDVTLAPA

SEQ ID NO: 151 - protein, 15 aa, Artificial Sequence
  Synthetic Construct
TQGQDVTLAPATEPA

SEQ ID NO: 152 - protein, 15 aa, Artificial Sequence
  Synthetic Construct
DVTLAPATEPASGSA

SEQ ID NO: 153 - protein, 15 aa, Artificial Sequence
  Synthetic Construct
APATEPASGSAATWG

SEQ ID NO: 154 - protein, 15 aa, Artificial Sequence
  Synthetic Construct
EPASGSAATWGQDVT

SEQ ID NO: 155 - protein, 15 aa, Artificial Sequence
  Synthetic Construct
GSAATWGQDVTSVPV

SEQ ID NO: 156 - protein, 15 aa, Artificial Sequence
  Synthetic Construct
TWGQDVTSVPVTRPA

SEQ ID NO: 157 - protein, 15 aa, Artificial Sequence
  Synthetic Construct
DVTSVPVTRPALGST

SEQ ID NO: 158 - protein, 15 aa, Artificial Sequence
  Synthetic Construct
VPVTRPALGSTTPPA

SEQ ID NO: 159 - protein, 15 aa, Artificial Sequence
  Synthetic Construct
RPALGSTTPPAHDVT

SEQ ID NO: 160 - protein, 15 aa, Artificial Sequence
  Synthetic Construct
GSTTPPAHDVTSAPD

SEQ ID NO: 161 - protein, 15 aa, Artificial Sequence
  Synthetic Construct
PPAHDVTSAPDNKPA

SEQ ID NO: 162 - protein, 15 aa, Artificial Sequence
  Synthetic Construct
DVTSAPDNKPAPGST

SEQ ID NO: 163 - protein, 15 aa, Artificial Sequence
  Synthetic Construct
APDNKPAPGSTAPPA

SEQ ID NO: 164 - protein, 15 aa, Artificial Sequence
  Synthetic Construct
KPAPGSTAPPAHGVT

SEQ ID NO: 165 - protein, 15 aa, Artificial Sequence
  Synthetic Construct
GSTAPPAHGVTSAPD

SEQ ID NO: 166 - protein, 15 aa, Artificial Sequence
  Synthetic Construct
PPAHGVTSAPDTRPA

SEQ ID NO: 167 - protein, 15 aa, Artificial Sequence
  Synthetic Construct
GVTSAPDTRPAPGST

SEQ ID NO: 168 - protein, 15 aa, Artificial Sequence
  Synthetic Construct
APDTRPAPGSTAPPA

SEQ ID NO: 169 - protein, 15 aa, Artificial Sequence
  Synthetic Construct
RPAPGSTAPPAHGVT

SEQ ID NO: 170 - protein, 15 aa, Artificial Sequence
  Synthetic Construct
GVTSAPDTRPALGST

SEQ ID NO: 171 - protein, 15 aa, Artificial Sequence
  Synthetic Construct
APDTRPALGSTAPPV

SEQ ID NO: 172 - protein, 15 aa, Artificial Sequence
  Synthetic Construct
RPALGSTAPPVHNVT

SEQ ID NO: 173 - protein, 15 aa, Artificial Sequence
  Synthetic Construct
GSTAPPVHNVTSASG

SEQ ID NO: 174 - protein, 15 aa, Artificial Sequence
  Synthetic Construct
PPVHNVTSASGSASG

SEQ ID NO: 175 - protein, 15 aa, Artificial Sequence
  Synthetic Construct
NVTSASGSASGSAST

SEQ ID NO: 176 - protein, 15 aa, Artificial Sequence
  Synthetic Construct
ASGSASGSASTLVHN

SEQ ID NO: 177 - protein, 15 aa, Artificial Sequence
  Synthetic Construct
ASGSASTLVHNGTSA

SEQ ID NO: 178 - protein, 15 aa, Artificial Sequence
  Synthetic Construct
ASTLVHNGTSARATT

SEQ ID NO: 179 - protein, 15 aa, Artificial Sequence
  Synthetic Construct
VHNGTSARATTTPAS

SEQ ID NO: 180 - protein, 15 aa, Artificial Sequence
  Synthetic Construct
TSARATTTPASKSTP

SEQ ID NO: 181 - protein, 15 aa, Artificial Sequence
  Synthetic Construct
ATTTPASKSTPFSIP

SEQ ID NO: 182 - protein, 15 aa, Artificial Sequence
  Synthetic Construct
PASKSTPFSIPSHHS

SEQ ID NO: 183 - protein, 15 aa, Artificial Sequence
  Synthetic Construct
STPFSIPSHHSDTPT

SEQ ID NO: 184 - protein, 15 aa, Artificial Sequence
  Synthetic Construct
SIPSHHSDTPTTLAS

SEQ ID NO: 185 - protein, 15 aa, Artificial Sequence
  Synthetic Construct
HHSDTPTTLASHSTK

SEQ ID NO: 186 - protein, 15 aa, Artificial Sequence
  Synthetic Construct
TPTTLASHSTKTDAS

SEQ ID NO: 187 - protein, 15 aa, Artificial Sequence
  Synthetic Construct
LASHSTKTDASSTHH

SEQ ID NO: 188 - protein, 15 aa, Artificial Sequence
  Synthetic Construct
STKTDASSTHHSSVP

SEQ ID NO: 189 - protein, 15 aa, Artificial Sequence
  Synthetic Construct
DASSTHHSSVPPLTS

SEQ ID NO: 190 - protein, 15 aa, Artificial Sequence
  Synthetic Construct
THHSSVPPLTSSNHS

SEQ ID NO: 191 - protein, 15 aa, Artificial Sequence
  Synthetic Construct
SVPPLTSSNHSTSPQ

SEQ ID NO: 192 - protein, 15 aa, Artificial Sequence
  Synthetic Construct
LTSSNHSTSPQLSTG

SEQ ID NO: 193 - protein, 15 aa, Artificial Sequence
  Synthetic Construct
NHSTSPQLSTGVSFF

SEQ ID NO: 194 - protein, 15 aa, Artificial Sequence
  Synthetic Construct
SPQLSTGVSFFFLSF

SEQ ID NO: 195 - protein, 15 aa, Artificial Sequence
  Synthetic Construct
STGVSFFFLSFHISN

SEQ ID NO: 196 - protein, 15 aa, Artificial Sequence
  Synthetic Construct
SFFFLSFHISNLQFN

SEQ ID NO: 197 - protein, 15 aa, Artificial Sequence
  Synthetic Construct
LSFHISNLQFNSSLE

SEQ ID NO: 198 - protein, 15 aa, Artificial Sequence
  Synthetic Construct
ISNLQFNSSLEDPST

SEQ ID NO: 199 - protein, 15 aa, Artificial Sequence
  Synthetic Construct
QFNSSLEDPSTDYYQ

SEQ ID NO: 200 - protein, 15 aa, Artificial Sequence
  Synthetic Construct
SLEDPSTDYYQELQR

SEQ ID NO: 201 - protein, 15 aa, Artificial Sequence
  Synthetic Construct
PSTDYYQELQRDISE

SEQ ID NO: 202 - protein, 15 aa, Artificial Sequence
  Synthetic Construct
YYQELQRDISEMFLQ

SEQ ID NO: 203 - protein, 15 aa, Artificial Sequence
  Synthetic Construct
LQRDISEMFLQIYKQ

SEQ ID NO: 204 - protein, 15 aa, Artificial Sequence
  Synthetic Construct
ISEMFLQIYKQGGFL

SEQ ID NO: 205 - protein, 15 aa, Artificial Sequence
  Synthetic Construct
FLQIYKQGGFLGLSN

SEQ ID NO: 206 - protein, 15 aa, Artificial Sequence
  Synthetic Construct
YKQGGFLGLSNIKFR

SEQ ID NO: 207 - protein, 15 aa, Artificial Sequence
  Synthetic Construct
GFLGLSNIKFRPGSV

SEQ ID NO: 208 - protein, 15 aa, Artificial Sequence
  Synthetic Construct
LSNIKFRPGSVVVQL

SEQ ID NO: 209 - protein, 15 aa, Artificial Sequence
  Synthetic Construct
KFRPGSVVVQLTLAF

SEQ ID NO: 210 - protein, 15 aa, Artificial Sequence
  Synthetic Construct
GSVVVQLTLAFREGT

SEQ ID NO: 211 - protein, 15 aa, Artificial Sequence
  Synthetic Construct
VVVQLTLAFREGTIN

SEQ ID NO: 212 - protein, 15 aa, Artificial Sequence
  Synthetic Construct
QLTLAFREGTINVHD

SEQ ID NO: 213 - protein, 15 aa, Artificial Sequence
  Synthetic Construct
AFREGTINVHDVETQ

SEQ ID NO: 214 - protein, 15 aa, Artificial Sequence
  Synthetic Construct
GTINVHDVETQFNQY

SEQ ID NO: 215 - protein, 15 aa, Artificial Sequence
  Synthetic Construct
VHDVETQFNQYKTEA

SEQ ID NO: 216 - protein, 15 aa, Artificial Sequence
  Synthetic Construct
ETQFNQYKTEAASRY

SEQ ID NO: 217 - protein, 15 aa, Artificial Sequence
  Synthetic Construct
NQYKTEAASRYNLTI

SEQ ID NO: 218 - protein, 15 aa, Artificial Sequence
  Synthetic Construct
TEAASRYNLTISDVS

SEQ ID NO: 219 - protein, 15 aa, Artificial Sequence
  Synthetic Construct
SRYNLTISDVSVSDV

SEQ ID NO: 220 - protein, 15 aa, Artificial Sequence
  Synthetic Construct
LTISDVSVSDVPFPF

SEQ ID NO: 221 - protein, 15 aa, Artificial Sequence
  Synthetic Construct
DVSVSDVPFPFSAQS

SEQ ID NO: 222 - protein, 15 aa, Artificial Sequence
  Synthetic Construct
SDVPFPFSAQSGAGV

SEQ ID NO: 223 - protein, 15 aa, Artificial Sequence
  Synthetic Construct
FPFSAQSGAGVPGWG

SEQ ID NO: 224 - protein, 15 aa, Artificial Sequence
  Synthetic Construct
AQSGAGVPGWGIALL

SEQ ID NO: 225 - protein, 15 aa, Artificial Sequence
  Synthetic Construct
AGVPGWGIALLVLVC

SEQ ID NO: 226 - protein, 15 aa, Artificial Sequence
  Synthetic Construct
GWGIALLVLVCVLVA

SEQ ID NO: 227 - protein, 15 aa, Artificial Sequence
  Synthetic Construct
ALLVLVCVLVALAIV

SEQ ID NO: 228 - protein, 15 aa, Artificial Sequence
  Synthetic Construct
LVCVLVALAIVYLIA

SEQ ID NO: 229 - protein, 15 aa, Artificial Sequence
  Synthetic Construct
LVALAIVYLIALAVC

SEQ ID NO: 230 - protein, 15 aa, Artificial Sequence
  Synthetic Construct
AIVYLIALAVCQCRR

SEQ ID NO: 231 - protein, 15 aa, Artificial Sequence
  Synthetic Construct
LIALAVCQCRRKNYG

SEQ ID NO: 232 - protein, 15 aa, Artificial Sequence
  Synthetic Construct
AVCQCRRKNYGQLDI

SEQ ID NO: 233 - protein, 15 aa, Artificial Sequence
  Synthetic Construct
CRRKNYGQLDIFPAR

SEQ ID NO: 234 - protein, 15 aa, Artificial Sequence
  Synthetic Construct
NYGQLDIFPARDTYH

SEQ ID NO: 235 - protein, 15 aa, Artificial Sequence
  Synthetic Construct
LDIFPARDTYHPMSE

SEQ ID NO: 236 - protein, 15 aa, Artificial Sequence
  Synthetic Construct
PARDTYHPMSEYPTY

SEQ ID NO: 237 - protein, 15 aa, Artificial Sequence
  Synthetic Construct
TYHPMSEYPTYHTHG

SEQ ID NO: 238 - protein, 15 aa, Artificial Sequence
  Synthetic Construct
MSEYPTYHTHGRYVP

SEQ ID NO: 239 - protein, 15 aa, Artificial Sequence
  Synthetic Construct
PTYHTHGRYVPPSST

SEQ ID NO: 240 - protein, 15 aa, Artificial Sequence
  Synthetic Construct
THGRYVPPSSTDRSP

SEQ ID NO: 241 - protein, 15 aa, Artificial Sequence
  Synthetic Construct
YVPPSSTDRSPYEKV

SEQ ID NO: 242 - protein, 15 aa, Artificial Sequence
  Synthetic Construct
SSTDRSPYEKVSAGN

SEQ ID NO: 243 - protein, 15 aa, Artificial Sequence
  Synthetic Construct
RSPYEKVSAGNGGSS

SEQ ID NO: 244 - protein, 15 aa, Artificial Sequence
  Synthetic Construct
EKVSAGNGGSSLSYT

SEQ ID NO: 245 - protein, 15 aa, Artificial Sequence
  Synthetic Construct
AGNGGSSLSYTNPAV

SEQ ID NO: 246 - protein, 15 aa, Artificial Sequence
  Synthetic Construct
GSSLSYTNPAVAAAS

SEQ ID NO: 247 - protein, 15 aa, Artificial Sequence
  Synthetic Construct
LSYTNPAVAAASANL

SEQ ID NO: 248 - protein, 15 aa, Artificial Sequence
  Synthetic Construct
MASLPTARPLLGSCG

SEQ ID NO: 249 - protein, 15 aa, Artificial Sequence
  Synthetic Construct
TARPLLGSCGTPALG

SEQ ID NO: 250 - protein, 15 aa, Artificial Sequence
  Synthetic Construct
LLGSCGTPALGSLLF

SEQ ID NO: 251 - protein, 15 aa, Artificial Sequence
  Synthetic Construct
CGTPALGSLLFLLFS

SEQ ID NO: 252 - protein, 15 aa, Artificial Sequence
  Synthetic Construct
ALGSLLFLLFSLGWV

SEQ ID NO: 253 - protein, 15 aa, Artificial Sequence
  Synthetic Construct
LLFLLFSLGWVQPSR

SEQ ID NO: 254 - protein, 15 aa, Artificial Sequence
  Synthetic Construct
LFSLGWVQPSRTLAG

SEQ ID NO: 255 - protein, 15 aa, Artificial Sequence
  Synthetic Construct
GWVQPSRTLAGETGQ

SEQ ID NO: 256 - protein, 15 aa, Artificial Sequence
  Synthetic Construct
PSRTLAGETGQEAAP

SEQ ID NO: 257 - protein, 15 aa, Artificial Sequence
  Synthetic Construct
TLAGETGQEAAPLDG

SEQ ID NO: 258 - protein, 15 aa, Artificial Sequence
  Synthetic Construct
TGQEAAPLDGVLANP

SEQ ID NO: 259 - protein, 15 aa, Artificial Sequence
  Synthetic Construct
AAPLDGVLANPPNIS

SEQ ID NO: 260 - protein, 15 aa, Artificial Sequence
  Synthetic Construct
DGVLANPPNISSLSP

SEQ ID NO: 261 - protein, 15 aa, Artificial Sequence
  Synthetic Construct
ANPPNISSLSPRQLL

SEQ ID NO: 262 - protein, 15 aa, Artificial Sequence
  Synthetic Construct
NISSLSPRQLLGFPC

SEQ ID NO: 263 - protein, 15 aa, Artificial Sequence
  Synthetic Construct
LSPRQLLGFPCAEVS

SEQ ID NO: 264 - protein, 15 aa, Artificial Sequence
  Synthetic Construct
QLLGFPCAEVSGLST

SEQ ID NO: 265 - protein, 15 aa, Artificial Sequence
  Synthetic Construct
FPCAEVSGLSTERVR

SEQ ID NO: 266 - protein, 15 aa, Artificial Sequence
  Synthetic Construct
EVSGLSTERVRELAV

SEQ ID NO: 267 - protein, 15 aa, Artificial Sequence
  Synthetic Construct
LSTERVRELAVALAQ

SEQ ID NO: 268 - protein, 15 aa, Artificial Sequence
  Synthetic Construct
RVRELAVALAQKNVK

SEQ ID NO: 269 - protein, 15 aa, Artificial Sequence
  Synthetic Construct
LAVALAQKNVKLSTE

SEQ ID NO: 270 - protein, 15 aa, Artificial Sequence
  Synthetic Construct
LAQKNVKLSTEQLRC

SEQ ID NO: 271 - protein, 15 aa, Artificial Sequence
  Synthetic Construct
NVKLSTEQLRCLAHR

SEQ ID NO: 272 - protein, 15 aa, Artificial Sequence
  Synthetic Construct
STEQLRCLAHRLSEP

SEQ ID NO: 273 - protein, 15 aa, Artificial Sequence
  Synthetic Construct
LRCLAHRLSEPPEDL

SEQ ID NO: 274 - protein, 15 aa, Artificial Sequence
  Synthetic Construct
AHRLSEPPEDLDALP

SEQ ID NO: 275 - protein, 15 aa, Artificial Sequence
  Synthetic Construct
SEPPEDLDALPLDLL

SEQ ID NO: 276 - protein, 15 aa, Artificial Sequence
  Synthetic Construct
EDLDALPLDLLLFLN

SEQ ID NO: 277 - protein, 15 aa, Artificial Sequence
  Synthetic Construct
ALPLDLLLFLNPDAF

SEQ ID NO: 278 - protein, 15 aa, Artificial Sequence
  Synthetic Construct
DLLLFLNPDAFSGPQ

SEQ ID NO: 279 - protein, 15 aa, Artificial Sequence
  Synthetic Construct
FLNPDAFSGPQACTR

SEQ ID NO: 280 - protein, 15 aa, Artificial Sequence
  Synthetic Construct
DAFSGPQACTRFFSR

SEQ ID NO: 281 - protein, 15 aa, Artificial Sequence
  Synthetic Construct
GPQACTRFFSRITKA

SEQ ID NO: 282 - protein, 15 aa, Artificial Sequence
  Synthetic Construct
CTRFFSRITKANVDL

SEQ ID NO: 283 - protein, 15 aa, Artificial Sequence
  Synthetic Construct
FSRITKANVDLLPRG

SEQ ID NO: 284 - protein, 15 aa, Artificial Sequence
  Synthetic Construct
TKANVDLLPRGAPER

SEQ ID NO: 285 - protein, 15 aa, Artificial Sequence
  Synthetic Construct
VDLLPRGAPERQRLL

SEQ ID NO: 286 - protein, 15 aa, Artificial Sequence
  Synthetic Construct
PRGAPERQRLLPAAL

SEQ ID NO: 287 - protein, 15 aa, Artificial Sequence
  Synthetic Construct
PERQRLLPAALACWG

SEQ ID NO: 288 - protein, 15 aa, Artificial Sequence
  Synthetic Construct
RLLPAALACWGVRGS

SEQ ID NO: 289 - protein, 15 aa, Artificial Sequence
  Synthetic Construct
AALACWGVRGSLLSE

SEQ ID NO: 290 - protein, 15 aa, Artificial Sequence
  Synthetic Construct
CWGVRGSLLSEADVR

SEQ ID NO: 291 - protein, 15 aa, Artificial Sequence
  Synthetic Construct
RGSLLSEADVRALGG

SEQ ID NO: 292 - protein, 15 aa, Artificial Sequence
  Synthetic Construct
LSEADVRALGGLACD

SEQ ID NO: 293 - protein, 15 aa, Artificial Sequence
  Synthetic Construct
DVRALGGLACDLPGR

SEQ ID NO: 294 - protein, 15 aa, Artificial Sequence
  Synthetic Construct
LGGLACDLPGRFVAE

SEQ ID NO: 295 - protein, 15 aa, Artificial Sequence
  Synthetic Construct
ACDLPGRFVAESAEV

SEQ ID NO: 296 - protein, 15 aa, Artificial Sequence
  Synthetic Construct
PGRFVAESAEVLLPR

SEQ ID NO: 297 - protein, 15 aa, Artificial Sequence
  Synthetic Construct
VAESAEVLLPRLVSC

SEQ ID NO: 298 - protein, 15 aa, Artificial Sequence
  Synthetic Construct
AEVLLPRLVSCPGPL

SEQ ID NO: 299 - protein, 15 aa, Artificial Sequence
  Synthetic Construct
LPRLVSCPGPLDQDQ

SEQ ID NO: 300 - protein, 15 aa, Artificial Sequence
  Synthetic Construct
VSCPGPLDQDQQEAA

SEQ ID NO: 301 - protein, 15 aa, Artificial Sequence
  Synthetic Construct
GPLDQDQQEAARAAL

SEQ ID NO: 302 - protein, 15 aa, Artificial Sequence
  Synthetic Construct
QDQQEAARAALQGGG

SEQ ID NO: 303 - protein, 15 aa, Artificial Sequence
  Synthetic Construct
EAARAALQGGGPPYG

SEQ ID NO: 304 - protein, 15 aa, Artificial Sequence
  Synthetic Construct
AALQGGGPPYGPPST

SEQ ID NO: 305 - protein, 15 aa, Artificial Sequence
  Synthetic Construct
GGGPPYGPPSTWSVS

SEQ ID NO: 306 - protein, 15 aa, Artificial Sequence
  Synthetic Construct
PYGPPSTWSVSTMDA

SEQ ID NO: 307 - protein, 15 aa, Artificial Sequence
  Synthetic Construct
PSTWSVSTMDALRGL

SEQ ID NO: 308 - protein, 15 aa, Artificial Sequence
  Synthetic Construct
SVSTMDALRGLLPVL

SEQ ID NO: 309 - protein, 15 aa, Artificial Sequence
  Synthetic Construct
MDALRGLLPVLGQPI

SEQ ID NO: 310 - protein, 15 aa, Artificial Sequence
  Synthetic Construct
RGLLPVLGQPIIRSI

SEQ ID NO: 311 - protein, 15 aa, Artificial Sequence
  Synthetic Construct
PVLGQPIIRSIPQGI

SEQ ID NO: 312 - protein, 15 aa, Artificial Sequence
  Synthetic Construct
QPIIRSIPQGIVAAW

SEQ ID NO: 313 - protein, 15 aa, Artificial Sequence
  Synthetic Construct
RSIPQGIVAAWRQRS

SEQ ID NO: 314 - protein, 15 aa, Artificial Sequence
  Synthetic Construct
QGIVAAWRQRSSRDP

SEQ ID NO: 315 - protein, 15 aa, Artificial Sequence
  Synthetic Construct
AAWRQRSSRDPSWRQ

SEQ ID NO: 316 - protein, 15 aa, Artificial Sequence
  Synthetic Construct
QRSSRDPSWRQPERT

SEQ ID NO: 317 - protein, 15 aa, Artificial Sequence
  Synthetic Construct
RDPSWRQPERTILRP

SEQ ID NO: 318 - protein, 15 aa, Artificial Sequence
  Synthetic Construct
WRQPERTILRPRFRR

SEQ ID NO: 319 - protein, 15 aa, Artificial Sequence
  Synthetic Construct
ERTILRPRFRREVEK

SEQ ID NO: 320 - protein, 15 aa, Artificial Sequence
  Synthetic Construct
LRPRFRREVEKTACP

SEQ ID NO: 321 - protein, 15 aa, Artificial Sequence
  Synthetic Construct
FRREVEKTACPSGKK

SEQ ID NO: 322 - protein, 15 aa, Artificial Sequence
  Synthetic Construct
VEKTACPSGKKAREI

SEQ ID NO: 323 - protein, 15 aa, Artificial Sequence
  Synthetic Construct
ACPSGKKAREIDESL

SEQ ID NO: 324 - protein, 15 aa, Artificial Sequence
  Synthetic Construct
GKKAREIDESLIFYK

SEQ ID NO: 325 - protein, 15 aa, Artificial Sequence
  Synthetic Construct
REIDESLIFYKKWEL

SEQ ID NO: 326 - protein, 15 aa, Artificial Sequence
  Synthetic Construct
ESLIFYKKWELEACV

SEQ ID NO: 327 - protein, 15 aa, Artificial Sequence
  Synthetic Construct
FYKKWELEACVDAAL

SEQ ID NO: 328 - protein, 15 aa, Artificial Sequence
  Synthetic Construct
WELEACVDAALLATQ

SEQ ID NO: 329 - protein, 15 aa, Artificial Sequence
  Synthetic Construct
ACVDAALLATQMDRV

SEQ ID NO: 330 - protein, 15 aa, Artificial Sequence
  Synthetic Construct
AALLATQMDRVNAIP

SEQ ID NO: 331 - protein, 15 aa, Artificial Sequence
  Synthetic Construct
ATQMDRVNAIPFTYE

SEQ ID NO: 332 - protein, 15 aa, Artificial Sequence
  Synthetic Construct
DRVNAIPFTYEQLDV

SEQ ID NO: 333 - protein, 15 aa, Artificial Sequence
  Synthetic Construct
AIPFTYEQLDVLKHK

SEQ ID NO: 334 - protein, 15 aa, Artificial Sequence
  Synthetic Construct
TYEQLDVLKHKLDEL

SEQ ID NO: 335 - protein, 15 aa, Artificial Sequence
  Synthetic Construct
LDVLKHKLDELYPQG

SEQ ID NO: 336 - protein, 15 aa, Artificial Sequence
  Synthetic Construct
KHKLDELYPQGYPES

SEQ ID NO: 337 - protein, 15 aa, Artificial Sequence
  Synthetic Construct
DELYPQGYPESVIQH

SEQ ID NO: 338 - protein, 15 aa, Artificial Sequence
  Synthetic Construct
PQGYPESVIQHLGYL

SEQ ID NO: 339 - protein, 15 aa, Artificial Sequence
  Synthetic Construct
PESVIQHLGYLFLKM

SEQ ID NO: 340 - protein, 15 aa, Artificial Sequence
  Synthetic Construct
IQHLGYLFLKMSPED

SEQ ID NO: 341 - protein, 15 aa, Artificial Sequence
  Synthetic Construct
GYLFLKMSPEDIRKW

SEQ ID NO: 342 - protein, 15 aa, Artificial Sequence
  Synthetic Construct
LKMSPEDIRKWNVTS

SEQ ID NO: 343 - protein, 15 aa, Artificial Sequence
  Synthetic Construct
PEDIRKWNVTSLETL

SEQ ID NO: 344 - protein, 15 aa, Artificial Sequence
  Synthetic Construct
RKWNVTSLETLKALL

SEQ ID NO: 345 - protein, 15 aa, Artificial Sequence
  Synthetic Construct
VTSLETLKALLEVNK

SEQ ID NO: 346 - protein, 15 aa, Artificial Sequence
  Synthetic Construct
ETLKALLEVNKGHEM

SEQ ID NO: 347 - protein, 15 aa, Artificial Sequence
  Synthetic Construct
ALLEVNKGHEMSPQV

SEQ ID NO: 348 - protein, 15 aa, Artificial Sequence
  Synthetic Construct
VNKGHEMSPQVATLI

SEQ ID NO: 349 - protein, 15 aa, Artificial Sequence
  Synthetic Construct
HEMSPQVATLIDRFV

SEQ ID NO: 350 - protein, 15 aa, Artificial Sequence
  Synthetic Construct
PQVATLIDRFVKGRG

SEQ ID NO: 351 - protein, 15 aa, Artificial Sequence
  Synthetic Construct
TLIDRFVKGRGQLDK

SEQ ID NO: 352 - protein, 15 aa, Artificial Sequence
  Synthetic Construct
RFVKGRGQLDKDTLD

SEQ ID NO: 353 - protein, 15 aa, Artificial Sequence
  Synthetic Construct
GRGQLDKDTLDTLTA

SEQ ID NO: 354 - protein, 15 aa, Artificial Sequence
  Synthetic Construct
LDKDTLDTLTAFYPG

SEQ ID NO: 355 - protein, 15 aa, Artificial Sequence
  Synthetic Construct
TLDTLTAFYPGYLCS

SEQ ID NO: 356 - protein, 15 aa, Artificial Sequence
  Synthetic Construct
LTAFYPGYLCSLSPE

SEQ ID NO: 357 - protein, 15 aa, Artificial Sequence
  Synthetic Construct
YPGYLCSLSPEELSS

SEQ ID NO: 358 - protein, 15 aa, Artificial Sequence
  Synthetic Construct
LCSLSPEELSSVPPS

SEQ ID NO: 359 - protein, 15 aa, Artificial Sequence
  Synthetic Construct
SPEELSSVPPSSIWA

SEQ ID NO: 360 - protein, 15 aa, Artificial Sequence
  Synthetic Construct
LSSVPPSSIWAVRPQ

SEQ ID NO: 361 - protein, 15 aa, Artificial Sequence
  Synthetic Construct
PPSSIWAVRPQDLDT

SEQ ID NO: 362 - protein, 15 aa, Artificial Sequence
  Synthetic Construct
IWAVRPQDLDTCDPR

SEQ ID NO: 363 - protein, 15 aa, Artificial Sequence
  Synthetic Construct
RPQDLDTCDPRQLDV

SEQ ID NO: 364 - protein, 15 aa, Artificial Sequence
  Synthetic Construct
LDTCDPRQLDVLYPK

SEQ ID NO: 365 - protein, 15 aa, Artificial Sequence
  Synthetic Construct
DPRQLDVLYPKARLA

SEQ ID NO: 366 - protein, 15 aa, Artificial Sequence
  Synthetic Construct
LDVLYPKARLAFQNM

SEQ ID NO: 367 - protein, 15 aa, Artificial Sequence
  Synthetic Construct
YPKARLAFQNMNGSE

SEQ ID NO: 368 - protein, 15 aa, Artificial Sequence
  Synthetic Construct
RLAFQNMNGSEYFVK

SEQ ID NO: 369 - protein, 15 aa, Artificial Sequence
  Synthetic Construct
QNMNGSEYFVKIQSF

SEQ ID NO: 370 - protein, 15 aa, Artificial Sequence
  Synthetic Construct
GSEYFVKIQSFLGGA

SEQ ID NO: 371 - protein, 15 aa, Artificial Sequence
  Synthetic Construct
FVKIQSFLGGAPTED

SEQ ID NO: 372 - protein, 15 aa, Artificial Sequence
  Synthetic Construct
QSFLGGAPTEDLKAL

SEQ ID NO: 373 - protein, 15 aa, Artificial Sequence
  Synthetic Construct
GGAPTEDLKALSQQN

SEQ ID NO: 374 - protein, 15 aa, Artificial Sequence
  Synthetic Construct
TEDLKALSQQNVSMD

SEQ ID NO: 375 - protein, 15 aa, Artificial Sequence
  Synthetic Construct
KALSQQNVSMDLATF

SEQ ID NO: 376 - protein, 15 aa, Artificial Sequence
  Synthetic Construct
QQNVSMDLATFMKLR

SEQ ID NO: 377 - protein, 15 aa, Artificial Sequence
  Synthetic Construct
SMDLATFMKLRTDAV

SEQ ID NO: 378 - protein, 15 aa, Artificial Sequence
  Synthetic Construct
ATFMKLRTDAVLPLT

SEQ ID NO: 379 - protein, 15 aa, Artificial Sequence
  Synthetic Construct
KLRTDAVLPLTVAEV

SEQ ID NO: 380 - protein, 15 aa, Artificial Sequence
  Synthetic Construct
DAVLPLTVAEVQKLL

SEQ ID NO: 381 - protein, 15 aa, Artificial Sequence
  Synthetic Construct
PLTVAEVQKLLGPHV

SEQ ID NO: 382 - protein, 15 aa, Artificial Sequence
  Synthetic Construct
AEVQKLLGPHVEGLK

SEQ ID NO: 383 - protein, 15 aa, Artificial Sequence
  Synthetic Construct
KLLGPHVEGLKAEER

SEQ ID NO: 384 - protein, 15 aa, Artificial Sequence
  Synthetic Construct
PHVEGLKAEERHRPV

SEQ ID NO: 385 - protein, 15 aa, Artificial Sequence
  Synthetic Construct
GLKAEERHRPVRDWI

SEQ ID NO: 386 - protein, 15 aa, Artificial Sequence
  Synthetic Construct
EERHRPVRDWILRQR

SEQ ID NO: 387 - protein, 15 aa, Artificial Sequence
  Synthetic Construct
RPVRDWILRQRQDDL

SEQ ID NO: 388 - protein, 15 aa, Artificial Sequence
  Synthetic Construct
DWILRQRQDDLDTLG

SEQ ID NO: 389 - protein, 15 aa, Artificial Sequence
  Synthetic Construct
RQRQDDLDTLGLGLQ

SEQ ID NO: 390 - protein, 15 aa, Artificial Sequence
  Synthetic Construct
DDLDTLGLGLQGGIP

SEQ ID NO: 391 - protein, 15 aa, Artificial Sequence
  Synthetic Construct
TLGLGLQGGIPNGYL

SEQ ID NO: 392 - protein, 15 aa, Artificial Sequence
  Synthetic Construct
GLQGGIPNGYLVLDL

SEQ ID NO: 393 - protein, 15 aa, Artificial Sequence
  Synthetic Construct
GIPNGYLVLDLSMQE

SEQ ID NO: 394 - protein, 15 aa, Artificial Sequence
  Synthetic Construct
YLVLDLSMQEALSGT

SEQ ID NO: 395 - protein, 15 aa, Artificial Sequence
  Synthetic Construct
LDLSMQEALSGTPCL

SEQ ID NO: 396 - protein, 15 aa, Artificial Sequence
  Synthetic Construct
MQEALSGTPCLLGPG

SEQ ID NO: 397 - protein, 15 aa, Artificial Sequence
  Synthetic Construct
LSGTPCLLGPGPVLT

SEQ ID NO: 398 - protein, 15 aa, Artificial Sequence
  Synthetic Construct
PCLLGPGPVLTVLAL

SEQ ID NO: 399 - protein, 15 aa, Artificial Sequence
  Synthetic Construct
GPGPVLTVLALLLAS

SEQ ID NO: 400 - protein, 15 aa, Artificial Sequence
  Synthetic Construct
PVLTVLALLLASTLA

SEQ ID NO: 401 - protein, 15 aa, Artificial Sequence
  Synthetic Construct
RRGAAPEPERTPVGQ

SEQ ID NO: 402 - protein, 15 aa, Artificial Sequence
  Synthetic Construct
APEPERTPVGQGSWA

SEQ ID NO: 403 - protein, 15 aa, Artificial Sequence
  Synthetic Construct
ERTPVGQGSWAHPGR

SEQ ID NO: 404 - protein, 15 aa, Artificial Sequence
  Synthetic Construct
VGQGSWAHPGRTRGP

SEQ ID NO: 405 - protein, 15 aa, Artificial Sequence
  Synthetic Construct
SWAHPGRTRGPSDRG

SEQ ID NO: 406 - protein, 15 aa, Artificial Sequence
  Synthetic Construct
PGRTRGPSDRGFCVV

SEQ ID NO: 407 - protein, 15 aa, Artificial Sequence
  Synthetic Construct
RGPSDRGFCVVSPAR

SEQ ID NO: 408 - protein, 15 aa, Artificial Sequence
  Synthetic Construct
DRGFCVVSPARPAEE

SEQ ID NO: 409 - protein, 15 aa, Artificial Sequence
  Synthetic Construct
CVVSPARPAEEATSL

SEQ ID NO: 410 - protein, 15 aa, Artificial Sequence
  Synthetic Construct
PARPAEEATSLEGAL

SEQ ID NO: 411 - protein, 15 aa, Artificial Sequence
  Synthetic Construct
AEEATSLEGALSGTR

SEQ ID NO: 412 - protein, 15 aa, Artificial Sequence
  Synthetic Construct
TSLEGALSGTRHSHP

SEQ ID NO: 413 - protein, 15 aa, Artificial Sequence
  Synthetic Construct
GALSGTRHSHPSVGR

SEQ ID NO: 414 - protein, 15 aa, Artificial Sequence
  Synthetic Construct
GTRHSHPSVGRQHHA

SEQ ID NO: 415 - protein, 15 aa, Artificial Sequence
  Synthetic Construct
SHPSVGRQHHAGPPS

SEQ ID NO: 416 - protein, 15 aa, Artificial Sequence
  Synthetic Construct
VGRQHHAGPPSTSRP

SEQ ID NO: 417 - protein, 15 aa, Artificial Sequence
  Synthetic Construct
HHAGPPSTSRPPRPW

SEQ ID NO: 418 - protein, 15 aa, Artificial Sequence
  Synthetic Construct
PPSTSRPPRPWDTPC

SEQ ID NO: 419 - protein, 15 aa, Artificial Sequence
  Synthetic Construct
SRPPRPWDTPCPPVY

SEQ ID NO: 420 - protein, 15 aa, Artificial Sequence
  Synthetic Construct
RPWDTPCPPVYAETK

SEQ ID NO: 421 - protein, 15 aa, Artificial Sequence
  Synthetic Construct
TPCPPVYAETKHFLY

SEQ ID NO: 422 - protein, 15 aa, Artificial Sequence
  Synthetic Construct
PVYAETKHFLYSSGD

SEQ ID NO: 423 - protein, 15 aa, Artificial Sequence
  Synthetic Construct
ETKHFLYSSGDKEQL

SEQ ID NO: 424 - protein, 15 aa, Artificial Sequence
  Synthetic Construct
FLYSSGDKEQLRPSF

SEQ ID NO: 425 - protein, 15 aa, Artificial Sequence
  Synthetic Construct
SGDKEQLRPSFLLSS

SEQ ID NO: 426 - protein, 15 aa, Artificial Sequence
  Synthetic Construct
EQLRPSFLLSSLRPS

SEQ ID NO: 427 - protein, 15 aa, Artificial Sequence
  Synthetic Construct
PSFLLSSLRPSLTGA

SEQ ID NO: 428 - protein, 15 aa, Artificial Sequence
  Synthetic Construct
LSSLRPSLTGARRLV

SEQ ID NO: 429 - protein, 15 aa, Artificial Sequence
  Synthetic Construct
RPSLTGARRLVETIF

SEQ ID NO: 430 - protein, 15 aa, Artificial Sequence
  Synthetic Construct
TGARRLVETIFLGSR

SEQ ID NO: 431 - protein, 15 aa, Artificial Sequence
  Synthetic Construct
RLVETIFLGSRPWMP

SEQ ID NO: 432 - protein, 15 aa, Artificial Sequence
  Synthetic Construct
TIFLGSRPWMPGTPR

SEQ ID NO: 433 - protein, 15 aa, Artificial Sequence
  Synthetic Construct
GSRPWMPGTPRRLPR

SEQ ID NO: 434 - protein, 15 aa, Artificial Sequence
  Synthetic Construct
WMPGTPRRLPRLPQR

SEQ ID NO: 435 - protein, 15 aa, Artificial Sequence
  Synthetic Construct
TPRRLPRLPQRYWQM

SEQ ID NO: 436 - protein, 15 aa, Artificial Sequence
  Synthetic Construct
LPRLPQRYWQMRPLF

SEQ ID NO: 437 - protein, 15 aa, Artificial Sequence
  Synthetic Construct
PQRYWQMRPLFLELL

SEQ ID NO: 438 - protein, 15 aa, Artificial Sequence
  Synthetic Construct
WQMRPLFLELLGNHA

SEQ ID NO: 439 - protein, 15 aa, Artificial Sequence
  Synthetic Construct
PLFLELLGNHAQCPY

SEQ ID NO: 440 - protein, 15 aa, Artificial Sequence
  Synthetic Construct
ELLGNHAQCPYGVLL

SEQ ID NO: 441 - protein, 15 aa, Artificial Sequence
  Synthetic Construct
NHAQCPYGVLLKTHC

SEQ ID NO: 442 - protein, 15 aa, Artificial Sequence
  Synthetic Construct
CPYGVLLKTHCPLRA

SEQ ID NO: 443 - protein, 15 aa, Artificial Sequence
  Synthetic Construct
VLLKTHCPLRAAVTP

SEQ ID NO: 444 - protein, 15 aa, Artificial Sequence
  Synthetic Construct
THCPLRAAVTPAAGV

SEQ ID NO: 445 - protein, 15 aa, Artificial Sequence
  Synthetic Construct
LRAAVTPAAGVCARE

SEQ ID NO: 446 - protein, 15 aa, Artificial Sequence
  Synthetic Construct
VTPAAGVCAREKPQG

SEQ ID NO: 447 - protein, 15 aa, Artificial Sequence
  Synthetic Construct
AGVCAREKPQGSVAA

SEQ ID NO: 448 - protein, 15 aa, Artificial Sequence
  Synthetic Construct
AREKPQGSVAAPEEE

SEQ ID NO: 449 - protein, 15 aa, Artificial Sequence
  Synthetic Construct
PQGSVAAPEEEDTDP

SEQ ID NO: 450 - protein, 15 aa, Artificial Sequence
  Synthetic Construct
VAAPEEEDTDPRRLV

SEQ ID NO: 451 - protein, 15 aa, Artificial Sequence
  Synthetic Construct
EEEDTDPRRLVQLLR

SEQ ID NO: 452 - protein, 15 aa, Artificial Sequence
  Synthetic Construct
TDPRRLVQLLRQHSS

SEQ ID NO: 453 - protein, 15 aa, Artificial Sequence
  Synthetic Construct
RLVQLLRQHSSPWQV

SEQ ID NO: 454 - protein, 15 aa, Artificial Sequence
  Synthetic Construct
LLRQHSSPWQVYGFV

SEQ ID NO: 455 - protein, 15 aa, Artificial Sequence
  Synthetic Construct
HSSPWQVYGFVRACL

SEQ ID NO: 456 - protein, 15 aa, Artificial Sequence
  Synthetic Construct
WQVYGFVRACLRRLV

SEQ ID NO: 457 - protein, 15 aa, Artificial Sequence
  Synthetic Construct
GFVRACLRRLVPPGL

SEQ ID NO: 458 - protein, 15 aa, Artificial Sequence
  Synthetic Construct
ACLRRLVPPGLWGSR

SEQ ID NO: 459 - protein, 15 aa, Artificial Sequence
  Synthetic Construct
RLVPPGLWGSRHNER

SEQ ID NO: 460 - protein, 15 aa, Artificial Sequence
  Synthetic Construct
PGLWGSRHNERRFLR

SEQ ID NO: 461 - protein, 15 aa, Artificial Sequence
  Synthetic Construct
GSRHNERRFLRNTKK

SEQ ID NO: 462 - protein, 15 aa, Artificial Sequence
  Synthetic Construct
NERRFLRNTKKFISL

SEQ ID NO: 463 - protein, 15 aa, Artificial Sequence
  Synthetic Construct
FLRNTKKFISLGKHA

SEQ ID NO: 464 - protein, 15 aa, Artificial Sequence
  Synthetic Construct
TKKFISLGKHAKLSL

SEQ ID NO: 465 - protein, 15 aa, Artificial Sequence
  Synthetic Construct
ISLGKHAKLSLQELT

SEQ ID NO: 466 - protein, 15 aa, Artificial Sequence
  Synthetic Construct
KHAKLSLQELTWKMS

SEQ ID NO: 467 - protein, 15 aa, Artificial Sequence
  Synthetic Construct
LSLQELTWKMSVRDC

SEQ ID NO: 468 - protein, 15 aa, Artificial Sequence
  Synthetic Construct
ELTWKMSVRDCAWLR

SEQ ID NO: 469 - protein, 15 aa, Artificial Sequence
  Synthetic Construct
KMSVRDCAWLRRSPG

SEQ ID NO: 470 - protein, 15 aa, Artificial Sequence
  Synthetic Construct
RDCAWLRRSPGVGCV

SEQ ID NO: 471 - protein, 15 aa, Artificial Sequence
  Synthetic Construct
WLRRSPGVGCVPAAE

SEQ ID NO: 472 - protein, 15 aa, Artificial Sequence
  Synthetic Construct
SPGVGCVPAAEHRLR

SEQ ID NO: 473 - protein, 15 aa, Artificial Sequence
  Synthetic Construct
GCVPAAEHRLREEIL

SEQ ID NO: 474 - protein, 15 aa, Artificial Sequence
  Synthetic Construct
AAEHRLREEILAKFL

SEQ ID NO: 475 - protein, 15 aa, Artificial Sequence
  Synthetic Construct
RLREEILAKFLHWLM

SEQ ID NO: 476 - protein, 15 aa, Artificial Sequence
  Synthetic Construct
EILAKFLHWLMSVYV

SEQ ID NO: 477 - protein, 15 aa, Artificial Sequence
  Synthetic Construct
KFLHWLMSVYVVELL

SEQ ID NO: 478 - protein, 15 aa, Artificial Sequence
  Synthetic Construct
WLMSVYVVELLRSFF

SEQ ID NO: 479 - protein, 15 aa, Artificial Sequence
  Synthetic Construct
VYVVELLRSFFYVTE

SEQ ID NO: 480 - protein, 15 aa, Artificial Sequence
  Synthetic Construct
ELLRSFFYVTETTFQ

SEQ ID NO: 481 - protein, 15 aa, Artificial Sequence
  Synthetic Construct
SFFYVTETTFQKNRL

SEQ ID NO: 482 - protein, 15 aa, Artificial Sequence
  Synthetic Construct
VTETTFQKNRLFFYR

SEQ ID NO: 483 - protein, 15 aa, Artificial Sequence
  Synthetic Construct
TFQKNRLFFYRKSVW

SEQ ID NO: 484 - protein, 15 aa, Artificial Sequence
  Synthetic Construct
NRLFFYRKSVWSKLQ

SEQ ID NO: 485 - protein, 15 aa, Artificial Sequence
  Synthetic Construct
FYRKSVWSKLQSIGI

SEQ ID NO: 486 - protein, 15 aa, Artificial Sequence
  Synthetic Construct
SVWSKLQSIGIRQHL

SEQ ID NO: 487 - protein, 15 aa, Artificial Sequence
  Synthetic Construct
KLQSIGIRQHLKRVQ

SEQ ID NO: 488 - protein, 15 aa, Artificial Sequence
  Synthetic Construct
IGIRQHLKRVQLREL

SEQ ID NO: 489 - protein, 15 aa, Artificial Sequence
  Synthetic Construct
QHLKRVQLRELSEAE

SEQ ID NO: 490 - protein, 15 aa, Artificial Sequence
  Synthetic Construct
RVQLRELSEAEVRQH

SEQ ID NO: 491 - protein, 15 aa, Artificial Sequence
  Synthetic Construct
RELSEAEVRQHREAR

SEQ ID NO: 492 - protein, 15 aa, Artificial Sequence
  Synthetic Construct
EAEVRQHREARPALL

SEQ ID NO: 493 - protein, 15 aa, Artificial Sequence
  Synthetic Construct
RQHREARPALLTSRL

SEQ ID NO: 494 - protein, 15 aa, Artificial Sequence
  Synthetic Construct
EARPALLTSRLRFIP

SEQ ID NO: 495 - protein, 15 aa, Artificial Sequence
  Synthetic Construct
ALLTSRLRFIPKPDG

SEQ ID NO: 496 - protein, 15 aa, Artificial Sequence
  Synthetic Construct
SRLRFIPKPDGLRPI

SEQ ID NO: 497 - protein, 15 aa, Artificial Sequence
  Synthetic Construct
FIPKPDGLRPIVNMD

SEQ ID NO: 498 - protein, 15 aa, Artificial Sequence
  Synthetic Construct
PDGLRPIVNMDYVVG

SEQ ID NO: 499 - protein, 15 aa, Artificial Sequence
  Synthetic Construct
RPIVNMDYVVGARTF

SEQ ID NO: 500 - protein, 15 aa, Artificial Sequence
  Synthetic Construct
NMDYVVGARTFRREK

SEQ ID NO: 501 - protein, 15 aa, Artificial Sequence
  Synthetic Construct
VVGARTFRREKRAER

SEQ ID NO: 502 - protein, 15 aa, Artificial Sequence
  Synthetic Construct
RTFRREKRAERLTSR

SEQ ID NO: 503 - protein, 15 aa, Artificial Sequence
  Synthetic Construct
REKRAERLTSRVKAL

SEQ ID NO: 504 - protein, 15 aa, Artificial Sequence
  Synthetic Construct
AERLTSRVKALFSVL

SEQ ID NO: 505 - protein, 15 aa, Artificial Sequence
  Synthetic Construct
TSRVKALFSVLNYER

SEQ ID NO: 506 - protein, 15 aa, Artificial Sequence
  Synthetic Construct
KALFSVLNYERARRP

SEQ ID NO: 507 - protein, 15 aa, Artificial Sequence
  Synthetic Construct
SVLNYERARRPGLLG

SEQ ID NO: 508 - protein, 15 aa, Artificial Sequence
  Synthetic Construct
YERARRPGLLGASVL

SEQ ID NO: 509 - protein, 15 aa, Artificial Sequence
  Synthetic Construct
RRPGLLGASVLGLDD

SEQ ID NO: 510 - protein, 15 aa, Artificial Sequence
  Synthetic Construct
LLGASVLGLDDIHRA

SEQ ID NO: 511 - protein, 15 aa, Artificial Sequence
  Synthetic Construct
SVLGLDDIHRAWRTF

SEQ ID NO: 512 - protein, 15 aa, Artificial Sequence
  Synthetic Construct
LDDIHRAWRTFVLRV

SEQ ID NO: 513 - protein, 15 aa, Artificial Sequence
  Synthetic Construct
HRAWRTFVLRVRAQD

SEQ ID NO: 514 - protein, 15 aa, Artificial Sequence
  Synthetic Construct
RTFVLRVRAQDPPPE

SEQ ID NO: 515 - protein, 15 aa, Artificial Sequence
  Synthetic Construct
LRVRAQDPPPELYFV

SEQ ID NO: 516 - protein, 15 aa, Artificial Sequence
  Synthetic Construct
AQDPPPELYFVKVDV

SEQ ID NO: 517 - protein, 15 aa, Artificial Sequence
  Synthetic Construct
PPELYFVKVDVTGAY

SEQ ID NO: 518 - protein, 15 aa, Artificial Sequence
  Synthetic Construct
YFVKVDVTGAYDTIP

SEQ ID NO: 519 - protein, 15 aa, Artificial Sequence
  Synthetic Construct
VDVTGAYDTIPQDRL

SEQ ID NO: 520 - protein, 15 aa, Artificial Sequence
  Synthetic Construct
GAYDTIPQDRLTEVI

SEQ ID NO: 521 - protein, 15 aa, Artificial Sequence
  Synthetic Construct
TIPQDRLTEVIASII

SEQ ID NO: 522 - protein, 15 aa, Artificial Sequence
  Synthetic Construct
DRLTEVIASIIKPQN

SEQ ID NO: 523 - protein, 15 aa, Artificial Sequence
  Synthetic Construct
EVIASIIKPQNTYCV

SEQ ID NO: 524 - protein, 15 aa, Artificial Sequence
  Synthetic Construct
SIIKPQNTYCVRRYA

SEQ ID NO: 525 - protein, 15 aa, Artificial Sequence
  Synthetic Construct
PQNTYCVRRYAVVQK

SEQ ID NO: 526 - protein, 15 aa, Artificial Sequence
  Synthetic Construct
YCVRRYAVVQKAAHG

SEQ ID NO: 527 - protein, 15 aa, Artificial Sequence
  Synthetic Construct
RYAVVQKAAHGHVRK

SEQ ID NO: 528 - protein, 15 aa, Artificial Sequence
  Synthetic Construct
VQKAAHGHVRKAFKS

SEQ ID NO: 529 - protein, 15 aa, Artificial Sequence
  Synthetic Construct
AHGHVRKAFKSHVST

SEQ ID NO: 530 - protein, 15 aa, Artificial Sequence
  Synthetic Construct
VRKAFKSHVSTLTDL

SEQ ID NO: 531 - protein, 15 aa, Artificial Sequence
  Synthetic Construct
FKSHVSTLTDLQPYM

SEQ ID NO: 532 - protein, 15 aa, Artificial Sequence
  Synthetic Construct
VSTLTDLQPYMRQFV

SEQ ID NO: 533 - protein, 15 aa, Artificial Sequence
  Synthetic Construct
TDLQPYMRQFVAHLQ

SEQ ID NO: 534 - protein, 15 aa, Artificial Sequence
  Synthetic Construct
PYMRQFVAHLQETSP

SEQ ID NO: 535 - protein, 15 aa, Artificial Sequence
  Synthetic Construct
QFVAHLQETSPLRDA

SEQ ID NO: 536 - protein, 15 aa, Artificial Sequence
  Synthetic Construct
HLQETSPLRDAVVIE

SEQ ID NO: 537 - protein, 15 aa, Artificial Sequence
  Synthetic Construct
TSPLRDAVVIEQSSS

SEQ ID NO: 538 - protein, 15 aa, Artificial Sequence
  Synthetic Construct
RDAVVIEQSSSLNEA

SEQ ID NO: 539 - protein, 15 aa, Artificial Sequence
  Synthetic Construct
VIEQSSSLNEASSGL

SEQ ID NO: 540 - protein, 15 aa, Artificial Sequence
  Synthetic Construct
SSSLNEASSGLFDVF

SEQ ID NO: 541 - protein, 15 aa, Artificial Sequence
  Synthetic Construct
NEASSGLFDVFLRFM

SEQ ID NO: 542 - protein, 15 aa, Artificial Sequence
  Synthetic Construct
SGLFDVFLRFMCHHA

SEQ ID NO: 543 - protein, 15 aa, Artificial Sequence
  Synthetic Construct
DVFLRFMCHHAVRIR

SEQ ID NO: 544 - protein, 15 aa, Artificial Sequence
  Synthetic Construct
RFMCHHAVRIRGKSY

SEQ ID NO: 545 - protein, 15 aa, Artificial Sequence
  Synthetic Construct
HHAVRIRGKSYVQCQ

SEQ ID NO: 546 - protein, 15 aa, Artificial Sequence
  Synthetic Construct
RIRGKSYVQCQGIPQ

SEQ ID NO: 547 - protein, 15 aa, Artificial Sequence
  Synthetic Construct
KSYVQCQGIPQGSIL

SEQ ID NO: 548 - protein, 15 aa, Artificial Sequence
  Synthetic Construct
QCQGIPQGSILSTLL

SEQ ID NO: 549 - protein, 15 aa, Artificial Sequence
  Synthetic Construct
IPQGSILSTLLCSLC

SEQ ID NO: 550 - protein, 15 aa, Artificial Sequence
  Synthetic Construct
SILSTLLCSLCYGDM

SEQ ID NO: 551 - protein, 15 aa, Artificial Sequence
  Synthetic Construct
TLLCSLCYGDMENKL

SEQ ID NO: 552 - protein, 15 aa, Artificial Sequence
  Synthetic Construct
SLCYGDMENKLFAGI

SEQ ID NO: 553 - protein, 15 aa, Artificial Sequence
  Synthetic Construct
GDMENKLFAGIRRDG

SEQ ID NO: 554 - protein, 15 aa, Artificial Sequence
  Synthetic Construct
NKLFAGIRRDGLLLR

SEQ ID NO: 555 - protein, 15 aa, Artificial Sequence
  Synthetic Construct
AGIRRDGLLLRLVDD

SEQ ID NO: 556 - protein, 15 aa, Artificial Sequence
  Synthetic Construct
RDGLLLRLVDDFLLV

SEQ ID NO: 557 - protein, 15 aa, Artificial Sequence
  Synthetic Construct
LLRLVDDFLLVTPHL

SEQ ID NO: 558 - protein, 15 aa, Artificial Sequence
  Synthetic Construct
VDDFLLVTPHLTHAK

SEQ ID NO: 559 - protein, 15 aa, Artificial Sequence
  Synthetic Construct
LLVTPHLTHAKTFLR

SEQ ID NO: 560 - protein, 15 aa, Artificial Sequence
  Synthetic Construct
PHLTHAKTFLRTLVR

SEQ ID NO: 561 - protein, 15 aa, Artificial Sequence
  Synthetic Construct
HAKTFLRTLVRGVPE

SEQ ID NO: 562 - protein, 15 aa, Artificial Sequence
  Synthetic Construct
FLRTLVRGVPEYGCV

SEQ ID NO: 563 - protein, 15 aa, Artificial Sequence
  Synthetic Construct
LVRGVPEYGCVVNLR

SEQ ID NO: 564 - protein, 15 aa, Artificial Sequence
  Synthetic Construct
VPEYGCVVNLRKTVV

SEQ ID NO: 565 - protein, 15 aa, Artificial Sequence
  Synthetic Construct
GCVVNLRKTVVNFPV

SEQ ID NO: 566 - protein, 15 aa, Artificial Sequence
  Synthetic Construct
NLRKTVVNFPVEDEA

SEQ ID NO: 567 - protein, 15 aa, Artificial Sequence
  Synthetic Construct
TVVNFPVEDEALGGT

SEQ ID NO: 568 - protein, 15 aa, Artificial Sequence
  Synthetic Construct
FPVEDEALGGTAFVQ

SEQ ID NO: 569 - protein, 15 aa, Artificial Sequence
  Synthetic Construct
DEALGGTAFVQMPAH

SEQ ID NO: 570 - protein, 15 aa, Artificial Sequence
  Synthetic Construct
GGTAFVQMPAHGLFP

SEQ ID NO: 571 - protein, 15 aa, Artificial Sequence
  Synthetic Construct
FVQMPAHGLFPWCGL

SEQ ID NO: 572 - protein, 15 aa, Artificial Sequence
  Synthetic Construct
PAHGLFPWCGLLLDT

SEQ ID NO: 573 - protein, 15 aa, Artificial Sequence
  Synthetic Construct
LFPWCGLLLDTRTLE

SEQ ID NO: 574 - protein, 15 aa, Artificial Sequence
  Synthetic Construct
CGLLLDTRTLEVQSD

SEQ ID NO: 575 - protein, 15 aa, Artificial Sequence
  Synthetic Construct
LDTRTLEVQSDYSSY

SEQ ID NO: 576 - protein, 15 aa, Artificial Sequence
  Synthetic Construct
TLEVQSDYSSYARTS

SEQ ID NO: 577 - protein, 15 aa, Artificial Sequence
  Synthetic Construct
QSDYSSYARTSIRAS

SEQ ID NO: 578 - protein, 15 aa, Artificial Sequence
  Synthetic Construct
SSYARTSIRASLTFN

SEQ ID NO: 579 - protein, 15 aa, Artificial Sequence
  Synthetic Construct
RTSIRASLTFNRGFK

SEQ ID NO: 580 - protein, 15 aa, Artificial Sequence
  Synthetic Construct
RASLTFNRGFKAGRN

SEQ ID NO: 581 - protein, 15 aa, Artificial Sequence
  Synthetic Construct
TFNRGFKAGRNMRRK

SEQ ID NO: 582 - protein, 15 aa, Artificial Sequence
  Synthetic Construct
GFKAGRNMRRKLFGV

SEQ ID NO: 583 - protein, 15 aa, Artificial Sequence
  Synthetic Construct
GRNMRRKLFGVLRLK

SEQ ID NO: 584 - protein, 15 aa, Artificial Sequence
  Synthetic Construct
RRKLFGVLRLKCHSL

SEQ ID NO: 585 - protein, 15 aa, Artificial Sequence
  Synthetic Construct
FGVLRLKCHSLFLDL

SEQ ID NO: 586 - protein, 15 aa, Artificial Sequence
  Synthetic Construct
RLKCHSLFLDLQVNS

SEQ ID NO: 587 - protein, 15 aa, Artificial Sequence
  Synthetic Construct
HSLFLDLQVNSLQTV

SEQ ID NO: 588 - protein, 15 aa, Artificial Sequence
  Synthetic Construct
LDLQVNSLQTVCTNI

SEQ ID NO: 589 - protein, 15 aa, Artificial Sequence
  Synthetic Construct
VNSLQTVCTNIYKIL

SEQ ID NO: 590 - protein, 15 aa, Artificial Sequence
  Synthetic Construct
QTVCTNIYKILLLQA

SEQ ID NO: 591 - protein, 15 aa, Artificial Sequence
  Synthetic Construct
TNIYKILLLQAYRFH

SEQ ID NO: 592 - protein, 15 aa, Artificial Sequence
  Synthetic Construct
KILLLQAYRFHACVL

SEQ ID NO: 593 - protein, 15 aa, Artificial Sequence
  Synthetic Construct
LQAYRFHACVLQLPF

SEQ ID NO: 594 - protein, 15 aa, Artificial Sequence
  Synthetic Construct
RFHACVLQLPFHQQV

SEQ ID NO: 595 - protein, 15 aa, Artificial Sequence
  Synthetic Construct
CVLQLPFHQQVWKNP

SEQ ID NO: 596 - protein, 15 aa, Artificial Sequence
  Synthetic Construct
LPFHQQVWKNPTFFL

SEQ ID NO: 597 - protein, 15 aa, Artificial Sequence
  Synthetic Construct
QQVWKNPTFFLRVIS

SEQ ID NO: 598 - protein, 15 aa, Artificial Sequence
  Synthetic Construct
KNPTFFLRVISDTAS

SEQ ID NO: 599 - protein, 15 aa, Artificial Sequence
  Synthetic Construct
FFLRVISDTASLCYS

SEQ ID NO: 600 - protein, 15 aa, Artificial Sequence
  Synthetic Construct
VISDTASLCYSILKA

SEQ ID NO: 601 - protein, 15 aa, Artificial Sequence
  Synthetic Construct
TASLCYSILKAKNAG

SEQ ID NO: 602 - protein, 15 aa, Artificial Sequence
  Synthetic Construct
CYSILKAKNAGMSLG

SEQ ID NO: 603 - protein, 15 aa, Artificial Sequence
  Synthetic Construct
LKAKNAGMSLGAKGA

SEQ ID NO: 604 - protein, 15 aa, Artificial Sequence
  Synthetic Construct
NAGMSLGAKGAAGPL

SEQ ID NO: 605 - protein, 15 aa, Artificial Sequence
  Synthetic Construct
SLGAKGAAGPLPSEA

SEQ ID NO: 606 - protein, 15 aa, Artificial Sequence
  Synthetic Construct
KGAAGPLPSEAVQWL

SEQ ID NO: 607 - protein, 15 aa, Artificial Sequence
  Synthetic Construct
GPLPSEAVQWLCHQA

SEQ ID NO: 608 - protein, 15 aa, Artificial Sequence
  Synthetic Construct
SEAVQWLCHQAFLLK

SEQ ID NO: 609 - protein, 15 aa, Artificial Sequence
  Synthetic Construct
QWLCHQAFLLKLTRH

SEQ ID NO: 610 - protein, 15 aa, Artificial Sequence
  Synthetic Construct
HQAFLLKLTRHRVTY

SEQ ID NO: 611 - protein, 15 aa, Artificial Sequence
  Synthetic Construct
LLKLTRHRVTYVPLL

SEQ ID NO: 612 - protein, 15 aa, Artificial Sequence
  Synthetic Construct
TRHRVTYVPLLGSLR

SEQ ID NO: 613 - protein, 15 aa, Artificial Sequence
  Synthetic Construct
VTYVPLLGSLRTAQT

SEQ ID NO: 614 - protein, 15 aa, Artificial Sequence
  Synthetic Construct
PLLGSLRTAQTQLSR

SEQ ID NO: 615 - protein, 15 aa, Artificial Sequence
  Synthetic Construct
SLRTAQTQLSRKLPG

SEQ ID NO: 616 - protein, 15 aa, Artificial Sequence
  Synthetic Construct
AQTQLSRKLPGTTLT

SEQ ID NO: 617 - protein, 15 aa, Artificial Sequence
  Synthetic Construct
LSRKLPGTTLTALEA

SEQ ID NO: 618 - protein, 15 aa, Artificial Sequence
  Synthetic Construct
LPGTTLTALEAAANP

SEQ ID NO: 619 - protein, 15 aa, Artificial Sequence
  Synthetic Construct
TLTALEAAANPALPS

SEQ ID NO: 620 - protein, 15 aa, Artificial Sequence
  Synthetic Construct
LEAAANPALPSDFKT

SEQ ID NO: 621 - protein, 15 aa, Artificial Sequence
  Synthetic Construct
AANPALPSDFKTILD
